(19) United States
(12) Patent Application Publication
(10) Pub. No.: US 2014/0170663 A1
(43) Pub. Date: Jun. 19, 2014

(54) METHYLATION SIGNATURE FOR REPLICATIVE SENESCENCE OF CELLS IN CULTURE

(71) Applicants: Wolfgang Wagner, Aachen (DE); Carmen Koch, Aachen (DE); Sylvia Joussen, Eschweiler (DE); Anne Schellenberg, Aachen (DE)

(72) Inventors: Wolfgang Wagner, Aachen (DE); Carmen Koch, Aachen (DE); Sylvia Joussen, Eschweiler (DE); Anne Schellenberg, Aachen (DE)

(73) Assignee: RHEINISCH-WESTFAELISCHE TECHNISCHE HOCHSCHULE AACHEN, AACHEN (DE)

(21) Appl. No.: 14/236,634

(22) PCT Filed: Aug. 6, 2012
(86) PCT No.: PCT/EP2012/065376

§ 371 Date: Feb. 3, 2014

(30) Foreign Application Priority Data
Aug. 4, 2011 (EP) 11176593.9

(51) Int. Cl. C12Q 1/68

(52) U.S. Cl. CPC C12Q 1/6883
USPC 435/6.11; 536/24.33

(57) ABSTRACT

A method for determining a replicative senescence status of a cell includes determining a methylation status of at least one CpG-dinucleotide within a region of at least one of about 50,000 bp upstream and downstream of at least one CpG-dinucleotide selected from the group consisting of GRM7-CpG-site #1, CASR-CpG-site #1, PRAMEF2-CpG-site #1, SELP-CpG-site #1, CASP14-CpG-site #1, and KRTAP13-3-CpG-site #1. The methylation status of each of the at least one CpG-dinucleotide determined is compared with a reference methylation status of the respective CpG-dinucleotide.

### CROSS REFERENCE TO PRIOR APPLICATIONS

[0001] This application is a U.S. National Phase application under 35 U.S.C. §371 of International Application No. PCT/EP2012/065376, filed on Aug. 6, 2012 and which claims benefit to European Patent Application No. 11176593.9, filed on Aug. 4, 2011. The International Application was published in English on Feb. 7, 2013 as WO 2013/017701 A1 under PCT Article 21(2).

### FIELD

[0002] The present invention relates to DNA-methylation and its association with cellular aging. The present invention in particular relates to a method and to a kit for determining the replicative senescence status of a cell, wherein the methylation status of at least one of the CpG-dinucleotide is determined and compared with a reference methylation status of the respective CpG-dinucleotide.

### SEQUENCE LISTING

[0003] The Sequence Listing associated with this application is filed in electronic form via EFS-Web and is hereby incorporated by reference into this specification in its entirety. The name of the text file containing the Sequence Listing is 270114_Sequence_Listing. The size of the text file is 1,603,346 Bytes, and the text file was created on Jan. 27, 2014.

### BACKGROUND

[0004] Cell therapy and tissue engineering raise tremendous expectations with respect to future clinical applications. This is, for example, reflected by an increasing number of clinical studies in this technical field. Mesenchymal stromal cells (MSCs) are of particular interest for clinical applications because they can be isolated from a variety of tissues, and because they comprise a rare population of adult stem cells having the potential of multi-lineage differentiation.

[0005] It is necessary to isolate cells for clinical use from at least one of a variety of tissues, for example, from dermis, bone marrow or adipose tissue, and to generate a sufficiently large number of cells by expansion in-vitro, i.e., cell culture. Mammalian cells, however, can be expanded in culture for only a limited number of passages. The cells enter a senescent state and stop proliferation. This phenomenon is not observed in cultures of embryonic stem cells and induced pluripotent stem cells as long as these cells maintain their totipotent or pluripotent state. This difference indicates that this phenomenon is based on a regulated aging process rather than a mere accumulation of cellular defects. Cellular aging is associated with increasing cell size and a flattened cellular morphology. The proliferation rate of the cell and in vitro differentiation of various cell types, such as MSCs, declines with increasing numbers of cell passages. Cells moreover acquire mutations in long-term culture which may result in malignant transformation of affected cells.

[0006] The alteration of cellular morphology and functionality during cellular aging has a tremendous impact on the engraftment and success of transplantation when cells are used in clinical therapy. It is therefore important to consider cellular aging and the age of cells as a measure for their quality, especially in the emerging field of cellular therapy. No standards for expanding MSCs in vitro and their use in therapy are, however, yet available. This may be due to the lack of standardized conditions for their isolation and the lack of specific molecular markers.

[0007] Commonly used parameters for assessing cellular aging are passage number, cumulative population doubling, and time of in vitro culture. However, these parameters have to be documented very thoroughly throughout culture expansion of the cells. It would otherwise be impossible to determine cellular age. Karyotyping and SNP-arrays are recommended for analyzing cells in culture. These methods are not, however, suitable for finding a malignant subclone in a heterogeneous mixture of cells. Expression of senescence-associated beta-galactosidase can discern cells at their senescent stage, but hardly provides a quantitative measure for cellular aging. Cellular senescence is clearly associated with a loss of telomere integrity, and initial telomere length has been shown to correlate with replicative capacity. Telomere length and telomerase expression varies, however, in different cell types and have not proven as reliable quantitative measure for cellular aging.

[0008] There is therefore a need for molecular markers which allow for a reliable assessment of the replicative senecscense of cells. It has recently been discovered that long-term culture of MSCs or fibroblasts is associated with specific epigenetic modifications in DNA-methylation profiles (Bork, S. et al., DNA Methylation Pattern Changes upon Long-Term Culture and Aging of Human Mesenchymal Stromal Cells., Aging Cell 9, pp. 54-63 (2010); Koch, C. et al., Specific Age-associated DNA Methylation Changes in Human Dermal Fibroblasts., PLoS ONE 6, e16679 (2011). It was discovered that the methylation pattern of a variety of genes differed in cells from early passages (P2) and late passages (P8 to P15) in that the methylation status at 27,578 CpG dinucleotides was simultaneously analyzed using a microarray.

### SUMMARY

[0009] An aspect of the present invention is to provide markers which are more precise and reliable in assessing the replicative senescence of cells, and which may not only allow for distinguishing cells of an early passage from cells of a late passage, but which show a clear and unequivocal correlation between methylation status and passage number.

[0010] In an embodiment, the present invention provides a method for determining a replicative senescence status of a cell which includes determining a methylation status of at least one CpG-dinucleotide within a region of at least one of about 50,000 bp upstream and downstream of at least one CpG-dinucleotide selected from the group consisting of GRM7-CpG-site #1, CASR-CpG-site #1, PRAMEF2-CpG-site #1, SELP-CpG-site #1, CASP14-CpG-site #1, and KRTAP13-3-CpG-site #1. The methylation status of each of the at least one CpG-dinucleotide determined is compared with a reference methylation status of the respective CpG-dinucleotide.

### BRIEF DESCRIPTION OF THE DRAWINGS

[0011] The present invention is described in greater detail below on the basis of embodiments and of the drawings in which:

[0012] FIG. 1 shows the alteration in methylation of specific genes in relation to the number of passages of the cells in-vitro;

[0013] FIG. 2 shows the GRM7-CpG-site #1, the CASR-CpG-site #1, the PRAMEF2-CpG-site #1, the SELP-CpG-site #1, the CASP14-CpG-site #1, and the KRTAP13-3-CpG-site #1, as well as the adjacent 20 nucleotides upstream and downstream of each of these CpG-sites;

[0014] FIG. 3 shows the correlation of predicted passage numbers by means of the methylation status of six CpG-dinucleotides with the real passage number of the cells in-vitro;

[0015] FIG. 4 shows the predicted passage number of a variety of primary cells and a variety of cell lines;

[0016] FIG. 5 shows the methylation status of CpG-dinucleotides within a region of 50,000 bp upstream and downstream of the GRM7-CpG-site #1, the CASR-CpG-site #1, the PRAMEF2-CpG-site #1, the SELP-CpG-site #1, the CASP14-CpG-site #1, and the KRTAP13-3-CpG-site #1 (respectively referred to as “0”) of human bone marrow cells (hBMCs), wherein each x represents the methylation status of an early passage, and each dot represents the methylation status of a later (presenescent) passage;

[0017] FIG. 6 shows the methylation status of CpG-dinucleotides within a region of 5,000 bp upstream and downstream of the GRM7-CpG-site #1, the CASR-CpG-site #1, the PRAMEF2-CpG-site #1 (methylation data of this site were not available on the Illumina 450k chip used here), the SELP-CpG-site #1, and the KRTAP13-3-CpG-site #1 (respectively referred to as “0”), and within a region of 1,000 bp upstream and downstream of the CASP14-CpG-site #1 (also referred to as “0”) of human bone marrow cells (hBMCs), wherein each x represents the methylation status of an early passage, and each dot represents the methylation status of a later (presenescent) passage;

[0018] FIG. 7 shows long-term growth curves of culture-expanded cells, where human dermal fibroblasts and mesenchymal stem cells from bone marrow and adipose tissue were expanded in vitro using the indicated supplements. The long-term growth curves of the training data are based on the documentation of culture time and calculation of cumulative population doublings;

[0019] FIG. 8 shows Cumulative Population Doublings (cPD) reflected by the DNA methylation level of CpG sites GRM7-CpG-site #1 (CpG1), CASR-CpG-site #1 (CpG2), PRAMEF2-CpG-site #1 (CpG3), SELP-CpG-site #1 (CpG4), CASP14-CpG-site #1 (CpG5), and KRTAP13-3-CpG-site #1 (CpG6). The DNA methylation levels of these six specific CpG sites are plotted against the calculated cumulative Population Doublings of the training (A) and validation data (B). A clear correlation between cPD and methylation status is visible for both datasets. Regression lines, equations and regression coefficients are provided in the figure as well as media and supplements;

[0020] FIG. 9 shows predictions of cPD, passage number and days in culture based on the Senescence Signature according to the present invention. Linear regression models on the basis of DNA methylation at the 6 specific CpG sites (GRM7-CpG-site #1, CASR-CpG-site #1, PRAMEF2-CpG-site #1, SELP-CpG-site #1, CASP14-CpG-site #1, and KRTAP13-3-CpG-site #1) are applied to calculate cPD (A), passage numbers (B) or days in culture (C) of the validation data. These predictions are plotted against real cPD, passage numbers and days in culture. Regression coefficients are given in FIG. 8; and

[0021] FIG. 10 shows a screenshot of an input mask of a software designed for automated prediction of cPD, passages and days in culture of a given cell preparation. After typing in the corresponding methylation beta-values of the 6 specific CpG sites (GRM7-CpG-site #1, CASR-CpG-site #1, PRAMEF2-CpG-site #1, SELP-CpG-site #1, CASP14-CpG-site #1, and KRTAP13-3-CpG-site #1) and pressing the “Calculate” button, the results are calculated and displayed.

### DETAILED DESCRIPTION

[0022] In an embodiment of the present invention, the method comprises the steps of determining the methylation status of least one of the CpG-dinucleotides within a region of about 50,000 bp upstream and/or downstream of at least one of the CpG-dinucleotides selected from the group consisting of GRM7-CpG-site #1 (SEQ ID No. 33), CASR-CpG-site #1 (SEQ ID No. 34), PRAMEF2-CpG-site #1 (SEQ ID No. 35), SELP-CpG-site #1 (SEQ ID No. 36), CASP14-CpG-site #1 (SEQ ID No. 37), and KRTAP13-3-CpG-site #1 (SEQ ID No. 38), and of comparing the methylation status of the CpG-dinucleotide(s) with a reference methylation status for each of the respective CpG-dinucleotide(s). By comparing the methylation status of each of the at least one CpG-dinucleotides investigated with a reference methylation status of the respective CpG-dinucleotide, the replicative senescence status is determined. The term methylation status refers to the level of methylation, i.e., the number of methylated versus non-methylated CpG-dinucleotides of a specific GpG-dinucleotide. The multiple cells can, for example, be analysed for their methylation status. The methylation status of least one of the CpG-dinucleotides within a region of about 50,000 bp upstream and/or downstream of at least one of the CpG-dinucleotides selected from the group consisting of GRM7-CpG-site #1, CASR-CpG-site #1, PRAMEF2-CpG-site #1, SELP-CpG-site #1, CASP14-CpG-site #1, and KRTAP13-3-CpG-site #1 of multiple cells, i.e., for multiple corresponding DNA molecules, is thus determined, and compared with the reference methylation status of the respective CpG-dinucleotide, whereby the replicative senescence status is determined. The reference methylation status for a specific CpG-dinucleotide can, for example, be an empirically-determined methylation level representing a correlation between the methylation level of the CpG-dinucleotide and one or more of the duration cells spent in in-vitro culture, the number of passages cells went through, the cumulative population doubling, and the days of in-vitro culture of the cells.

[0023] The CpG-dinucleotides within a region of about 50,000 bp upstream and/or downstream of at least one of the CpG-dinucleotides selected from the group consisting of GRM7-CpG-site #1 (SEQ ID No. 33), CASR-CpG-site #1 (SEQ ID No. 34), PRAMEF2-CpG-site #1 (SEQ ID No. 35), SELP-CpG-site #1 (SEQ ID No. 36), CASP14-CpG-site #1 (SEQ ID No. 37), and KRTAP13-3-CpG-site #1 (SEQ ID No. 38) are all suitable to determine the senescence status of different cell populations (e.g., fibroblasts or MSCs cultured under various conditions and with different methods).

[0024] In an embodiment of the present invention, a method for identifying a cell culture which is suitable for therapeutic use is provided which comprises the steps of determining the methylation status, i.e., the status of methylated versus non-methylated versions of corresponding DNA molecules, by determining the methylation status of least one of the CpG-dinucleotides within a region of about 50,000 basepairs (bp) upstream and/or downstream of at least one of the CpG-dinucleotides selected from the group consisting of GRM7-CpG-site #1 (SEQ ID No. 33), CASR-CpG-site #1 (SEQ ID No. 34), PRAMEF2-CpG-site #1 (SEQ ID No. 35), SELP-CpG-site #1 (SEQ ID No. 36), CASP14-CpG-site #1 (SEQ ID No. 37), and KRTAP13-3-CpG-site #1 (SEQ ID No. 38) for multiple corresponding DNA molecules, and of comparing the methylation status of each of the at least one CpG-dinucleotides investigated with a reference methylation status of the respective CpG-dinucleotide, whereby the replicative senescence status is determined.

[0025] In an embodiment of the present invention, a use of at least one of the DNA molecules is provided comprising at least one CpG dinucleotide within a region of about 50,000 bp upstream and/or downstream of at least one of the CpG-dinucleotides selected from the group consisting of GRM7-CpG-site #1 (SEQ ID No. 33), CASR-CpG-site #1 (SEQ ID No. 34), PRAMEF2-CpG-site #1 (SEQ ID No. 35), SELP-CpG-site #1 (SEQ ID No. 36), CASP14-CpG-site #1 (SEQ ID No. 37), and KRTAP13-3-CpG-site #1 (SEQ ID No. 38) for determining the replicative senescence status of a cell.

[0026] In an embodiment of the present invention, a use of at least one of the DNA molecules is provided comprising at least one CpG dinucleotide within a region of about 50,000 bp upstream and/or downstream of at least one of the CpG-dinucleotides selected from the group consisting of GRM7-CpG-site #1 (SEQ ID No. 33), CASR-CpG-site #1 (SEQ ID No. 34), PRAMEF2-CpG-site #1 (SEQ ID No. 35), SELP-CpG-site #1 (SEQ ID No. 36), CASP14-CpG-site #1 (SEQ ID No. 37), and KRTAP13-3-CpG-site #1 (SEQ ID No. 38) for identifying a cell culture which is suitable for therapeutic uses.

[0027] In an embodiment of the present invention, a kit is provided for determining the replicative senescence status of a cell. In an embodiment of the present invention, a kit is provided for identifying a cell culture which is suitable for therapeutic uses.

[0028] In an embodiment of the present invention, the methylation status of the CpG-dinucleotide linearly correlates with the replicative senescence status of the cell. The CpG-dinucleotides within a region of about 50,000 bp upstream and/or downstream of at least one of the CpG-dinucleotides selected from the group consisting of GRM7-CpG-site #1 (SEQ ID No. 33), CASR-CpG-site #1 (SEQ ID No. 34), PRAMEF2-CpG-site #1 (SEQ ID No. 35), SELP-CpG-site #1 (SEQ ID No. 36), CASP14-CpG-site #1 (SEQ ID No. 37), and KRTAP13-3-CpG-site #1 (SEQ ID No. 38) are continuously methylated or demethylated with increasing senescence of the cells, i.e., a straight proportional change of the methylation status of these CpG-dinucleotides can be observed during proceeding senescence of the cells.

[0029] In an embodiment of the present invention, the methylation status of at least one of the CpG-dinucleotides within a region of about 40,000 bp upstream and/or downstream, for example, of about 30,000 bp upstream and/or downstream, for example, of about 20,000 bp upstream and/or downstream, for example, of about 10,000 bp upstream and/or downstream, for example, of about 5,000 bp upstream and/or downstream, for example, of about 3,000 bp upstream and/or downstream, or, for example, of about 1,000 bp upstream and/or downstream of at least one of the CpG-dinucleotides selected from the group consisting of GRM7-CpG-site #1, CASR-CpG-site #1, PRAMEF2-CpG-site #1, SELP-CpG-site #1, CASP14-CpG-site #1, and KRTAP13-3-CpG-site #1, is determined.

[0030] In an embodiment of the present invention, the replicative senescence status can, for example, be determined in that the methylation status is determined for at least one of the CpG-dinucleotides selected from the group consisting of GRM7-CpG-site #1, CASR-CpG-site #1, PRAMEF2-CpG-site #1, SELP-CpG-site #1, CASP14-CpG-site #1, and KRTAP13-3-CpG-site #1 for multiple corresponding DNA molecules.

[0031] In an preferred embodiment of the present invention, the cell can, for example, have been freshly isolated from a donor.

[0032] In embodiment of the present invention, the cell can, for example, have been cultured for some time.

[0033] In an embodiment of the present invention, the cell can, for example, have been selected from the group consisting of stromal cells and induced pluripotent stem cells.

[0034] In an embodiment of the present invention, the methylation status of two, three, four, five or all of the six CpG-dinucleotides from different DNA molecules which are selected from the group consisting of DNA molecules comprising at least one of the CpG-dinucleotides selected from the group consisting of GRM7-CpG-site #1, CASR-CpG-site #1, PRAMEF2-CpG-site #1, SELP-CpG-site #1, CASP14-CpG-site #1, and KRTAP13-3-CpG-site #1 is determined.

[0035] In an embodiment of the present invention, the methylation status can, for example, be determined by one or more methods selected from the group consisting of methylation specific PCR, COBRA-Assay, methylation-specific restriction pattern analysis, CHIP-sequencing, methyl-CAP-sequencing, and sequence analysis of bisulfite-treated DNA.

[0036] The present invention further includes the use of at least one nucleic acid molecule for determining the replicative senescence status of a cell according to the method according to the present invention, wherein the nucleic acid molecule comprises at least one nucleotide sequence selected from the group consisting of:
[0037] a) a nucleotide sequence comprising at least one of the CpG-dinucleotides within a region of about 50,000 bp upstream and/or downstream of at least one of the CpG-dinucleotides selected from the group consisting of GRM7-CpG-site #1, CASR-CpG-site #1, PRAMEF2-CpG-site #1, SELP-CpG-site #1, CASP14-CpG-site #1, and KRTAP13-3-CpG-site #1,
[0038] b) a nucleotide sequence which differs from the nucleotide sequence of a) by replacement of at most 10% of the nucleotides, but for the CpG-dinucleotide, and
[0039] c) a nucleotide sequence which corresponds to the complementary strand of the nucleotide sequence of a) or b).

[0040] The present invention also includes the use of at least one nucleic acid molecule for identifying a cell culture which is suitable for therapeutic uses, wherein the nucleic acid molecule comprises at least one nucleotide sequence selected from the group consisting of:
[0041] a) a nucleotide sequence comprising at least one of the CpG-dinucleotides within a region of about 50,000 bp upstream and/or downstream of at least one of the CpG-dinucleotides selected from the group consisting of GRM7-CpG-site #1, CASR-CpG-site #1, PRAMEF2-CpG-site #1, SELP-CpG-site #1, CASP14-CpG-site #1, and KRTAP13-3-CpG-site #1,
[0042] b) a nucleotide sequence which differs from the nucleotide sequence of a) by replacement of at most 10% of the nucleotides, but for said CpG-dinucleotide, and
[0043] c) a nucleotide sequence which corresponds to the complementary strand of the nucleotide sequence of a) or b).

[0044] In an embodiment of these uses, at least one of the CpG-dinucleotides within a region of about 40,000 bp upstream and/or downstream, for example, of about 30,000 bp upstream and/or downstream, for example, of about 20,000 bp upstream and/or downstream, for example, of about 10,000 bp upstream and/or downstream, for example, of about 5,000 bp upstream and/or downstream, for example, of about 3,000 bp upstream and/or downstream, or, for example, of about 1,000 bp upstream and/or downstream of at least one of the CpG-dinucleotides selected from the group consisting of GRM7-CpG-site #1, CASR-CpG-site #1, PRAMEF2-CpG-site #1, SELP-CpG-site #1, CASP14-CpG-site #1, and KRTAP13-3-CpG-site #1 is used.

[0045] In an embodiment of these uses, at least one of the CpG-dinucleotides is selected from the group consisting of GRM7-CpG-site #1, CASR-CpG-site #1, PRAMEF2-CpG-site #1, SELP-CpG-site #1, CASP14-CpG-site #1, and KRTAP13-3-CpG-site #1.

[0046] In an embodiment, the present invention provides a kit for determining the replicative senescence status of a cell, the kit comprising at least one oligonucleotide primer for amplifying and/or analyzing at least one of the CpG-dinucleotides within a region of about 50,000 bp upstream and/or downstream of at least one of the CpG-dinucleotides selected from the group consisting of GRM7-CpG-site #1, CASR-CpG-site #1, PRAMEF2-CpG-site #1, SELP-CpG-site #1, CASP14-CpG-site #1, and KRTAP13-3-CpG-site #1.

[0047] In an embodiment, the present invention provides a kit for identifying a cell culture which is suitable for therapeutic uses, the kit comprising at least one oligonucleotide primer for amplifying and/or analyzing at least one of the CpG-dinucleotides within a region of about 50,000 bp upstream and/or downstream of at least one of the CpG-dinucleotides selected from the group consisting of GRM7-CpG-site #1, CASR-CpG-site #1, PRAMEF2-CpG-site #1, SELP-CpG-site #1, CASP14-CpG-site #1, and KRTAP13-3-CpG-site #1.

[0048] In an embodiment of the present invention, the kits comprise at least one oligonucleotide primer for amplifying and/or analyzing at least one of the CpG-dinucleotides within a region of about 40,000 bp upstream and/or downstream, for example, of about 30,000 bp upstream and/or downstream, for example, of about 20,000 bp upstream and/or downstream, for example, of about 10,000 bp upstream and/or downstream, for example, of about 5,000 bp upstream and/or downstream, for example, of about 3,000 bp upstream and/or downstream, for example, of about 1,000 bp upstream and/or downstream of at least one of the CpG-dinucleotides selected from the group consisting of GRM7-CpG-site #1, CASR-CpG-site #1, PRAMEF2-CpG-site #1, SELP-CpG-site #1, CASP14-CpG-site #1, and KRTAP13-3-CpG-site #1.

[0049] In an embodiment of the present invention, these kits can, for example, comprise at least one oligonucleotide primer for amplifying and/or analyzing at least one of the CpG-dinucleotides selected from the group consisting of GRM7-CpG-site #1, CASR-CpG-site #1, PRAMEF2-CpG-site #1, SELP-CpG-site #1, CASP14-CpG-site #1, and KRTAP13-3-CpG-site #1.

[0050] In an embodiment of the present invention, the at least one oligonucleotide primer can for example, be selected from the group consisting of SEQ ID NO: 7 to SEQ ID NO: 24.

[0051] In an embodiment of the present invention, the kits further can, for example, further comprise at least one reaction buffer and/or reagents for at least one method selected from the group consisting of PCR-amplification, bisulfite-conversion of DNA, DNA-sequencing, preferably DNA-pyrosequencing, and COBRA-assay.

[0052] In an embodiment of the present invention, a computer-readable medium can, for example, be provided which has stored computer-executable instructions for causing a computer to perform a method for determining the replicative senescence status of a cell according to the method described above, comprising:
[0053] inputting at least one value of the determined methylation status of at least one of the CpG-dinucleotides within a region of about 50,000 bp upstream and/or downstream of at least one of the CpG-dinucleotides selected from the group consisting of GRM7-CpG-site #1, CASR-CpG-site #1, PRAMEF2-CpG-site #1, SELP-CpG-site #1, CASP14-CpG-site #1, and KRTAP13-3-CpG-site #1,
[0054] comparing the value of the determined methylation status with stored data representing a correlation between the methylation status of said CpG-dinucleotide and the replicative senescence status of the cell, and
[0055] displaying the replicative senescence status of the cell.

[0056] In an embodiment of the present invention, the stored data can, for example, comprise at least one linear regression equation.

[0057] The term “replicative senescence status” refers to the potential of a cell to undergo further cell divisions and to differentiate into different cell types. The replicative senescence status of a cell depends on the duration of the cell in in-vitro culture, on the culture conditions, on the number of passages, and on the age of the donor. A cell having a less advanced replicative senescence status has a higher differentiation potential and a higher proliferation potential then a cell having a more advanced replicative senescence status. Hence, when referring to a method to determine the replicative senescence status of a cell, it is intended and suitable for determining any one or more of the duration said cells spent in in-vitro culture, the number of passages said cells went through, the cumulative population doubling, and the days of in-vitro culture of the cells.

[0058] These and other aspects of the present invention will be apparent from and elucidated with reference to the exemplary embodiments and to the Figures.

[0059] In an embodiment of the present invention, a method for determining the replicative senescence status of a cell is provided. The method comprises the steps of determining the methylation status, i.e., the status of methylated versus non-methylated versions of corresponding DNA molecules, by determining the methylation status of least one of the CpG-dinucleotides within a region of about 100,000 bp upstream and/or downstream of at least one of the CpG-dinucleotides selected from the group consisting of GRM7-CpG-site #1, CASR-CpG-site #1, PRAMEF2-CpG-site #1, SELP-CpG-site #1, CASP14-CpG-site #1, and KRTAP13-3-CpG-site #1 for multiple corresponding DNA molecules, and of comparing the methylation status of each of the at least one CpG-dinucleotides investigated with a reference methylation status of the respective CpG-dinucleotide, whereby the replicative senescence status is determined.

[0060] In an embodiment of the present invention, the method can, for example, comprise determining the methylation status by determining the methylation status of least one of the CpG-dinucleotides within a region of about 50,000 bp upstream and/or downstream of at least one of the CpG-dinucleotides selected from the group consisting of GRM7-CpG-site #1, CASR-CpG-site #1, PRAMEF2-CpG-site #1, SELP-CpG-site #1, CASP14-CpG-site #1, and KRTAP13-3-CpG-site #1 for multiple corresponding DNA molecules. The method can, for example, comprise determining the methylation status by determining the methylation status of at least one of the CpG-dinucleotides within a region of about 40,000 bp upstream and/or downstream, of about 30,000 bp upstream and/or downstream, of about 20,000 bp upstream and/or downstream, of about 10,000 bp upstream and/or downstream, of about 5,000 bp upstream and/or downstream, of about 3,000 bp upstream and/or downstream, and/or, of about 1,000 bp upstream and/or downstream, of at least one of the CpG-dinucleotides selected from the group consisting of GRM7-CpG-site #1, CASR-CpG-site #1, PRAMEF2-CpG-site #1, SELP-CpG-site #1, CASP14-CpG-site #1, and KRTAP13-3-CpG-site #1 for multiple corresponding DNA molecules. The method can, for example, comprise determining the methylation status by determining the methylation status of least one of the CpG-dinucleotides selected from the group consisting of the CpG-dinucleotides of the GRM7 gene, the CASR gene, the PRAMEF2 gene, the SELP gene, the CASP14 gene, and the KRTAP13-3 gene. The method can, for example, comprise determining the methylation status by determining the methylation status of least one of the CpG-dinucleotides selected from the group consisting of GRM7-CpG-site #1, CASR-CpG-site #1, PRAMEF2-CpG-site #1, SELP-CpG-site #1, CASP14-CpG-site #1, and KRTAP13-3-CpG-site #1.

[0061] The region of about 100,000 bp upstream and downstream of CpG-dinucleotide GRM7-CpG-site #1 is represented by SEQ ID No. 33. The region of about 100,000 bp upstream and downstream of CpG-dinucleotide CASR-CpG-site #1 is represented by SEQ ID No. 34. The region of about 100,000 bp upstream and downstream of CpG-dinucleotide PRAMEF2-CpG-site #1 is represented by SEQ ID No. 35. The region of about 100,000 bp upstream and downstream of CpG-dinucleotide SELP-CpG-site #1 is represented by SEQ ID No. 36. The region of about 100,000 bp upstream and downstream of CpG-dinucleotide CASP14-CpG-site #1 is represented by SEQ ID No. 37. The region of about 100,000 bp upstream and downstream of CpG-dinucleotide KRTAP13-3-CpG-site #1 is represented by SEQ ID No. 38. It is understood that the respective SEQ ID Nos: 33 to 38 also include the regions of about 80,000 bp, 60,000 bp, 50,000 bp, 40,000 bg, 30,000 bp, 20,000 bp, 10,000 bp, 5,000 bp, 3,000 bp, and 1,000 bp upstream and downstream of each of the CpG-dinucleotides selected from the group consisting of GRM7-CpG-site #1, CASR-CpG-site #1, PRAMEF2-CpG-site #1, SELP-CpG-site #1, CASP14-CpG-site #1, and KRTAP13-3-CpG-site #1.

[0062] The cells may be cells that have been freshly isolated from a donor. This embodiment may, for example, permit monitoring the replicative senescence status of cells that were previously implanted for therapeutic use. It is possible to distinguish between native cells of the patient and foreign or native cells that were implanted, i.e., cultured for some time after being isolated from their donor, and before being implanted into the patient. In an embodiment of the method according to the present invention, the cells may have been cultured in-vitro for some time. This embodiment of the method allows determining the approximate time the cells have been in culture, and/or the approximate passage number of the cells, and/or the number of population doublings. In an embodiment of the method of the present invention, the cells can, for example, be mesenchymal stromal cells.

[0063] In an embodiment of the present invention, the cells can, for example, be induced pluripotent stem cells. Determining the replicative senescence status for induced pluripotent stem cell can be used to quantify the reprogramming efficiency.

[0064] In yet an embodiment of the present invention, the cells can, for example, have been frozen at any time and for any period of time before being analyzed. This embodiment is of particular relevance when retained samples of cells that were implanted for therapeutic use are to be analyzed for their replicative senescent status prior to being implanted.

[0065] The replicative senescence status of a cell can be determined by determining the methylation status of a single CpG-dinucleotides within a region of about 100,000 bp upstream and/or downstream of at least one of the CpG-dinucleotides selected from the group consisting of GRM7-CpG-site #1, CASR-CpG-site #1, PRAMEF2-CpG-site #1, SELP-CpG-site #1, CASP14-CpG-site #1, and KRTAP13-3-CpG-site #1 for multiple corresponding DNA molecules. The methylation status of two, three, four, five, or six different CpG-dinucleotides can, for example, be determined, wherein the two, three, four, five, or six CpG-dinucleotides are chosen from different DNA molecules of the group consisting of DNA molecules comprising GRM7-CpG-site #1, CASR-CpG-site #1, PRAMEF2-CpG-site #1, SELP-CpG-site #1, CASP14-CpG-site #1, and KRTAP13-3-CpG-site #1. The methylation status of two, three, four, five, or all six different CpG-dinucleotides selected from the group consisting of GRM7-CpG-site #1, CASR-CpG-site #1, PRAMEF2-CpG-site #1, SELP-CpG-site #1, CASP14-CpG-site #1, and KRTAP13-3-CpG-site #1 can, for example, be determined for multiple corresponding DNA. The more genes of this group involved in determining their methylation status, the more precise the determination of their replicative senescence status will be.

[0066] In embodiments of the method according to the present invention, the methylation status can, for example, be determined by one or more suitable methods selected from (but not restricted to) the group consisting of methylation specific PCR, sequence analysis of bisulfite-treated DNA, COBRA-Assay, CHIP-Sequencing, Next-Generation Sequencing, Methyl-CAP-sequencing and methylation-specific restriction patterns. MSP can rapidly assess the methylation status of virtually any group of CpG dinucleotides within a CpG island, independent of the use of cloning or methylation-sensitive restriction enzymes. The MSP comprises initial modification of DNA by sodium bisulfite, converting all unmethylated, but not methylated, cytosines to uracil, and subsequent amplification with primers specific for methylated versus unmethylated DNA.

[0067] MSP requires very small quantities of DNA, and is sensitive to 0.1% methylated alleles of a given CpG island locus. The methylation status can, for example, be determined by pyrosequencing of bisulfite-treated DNA which allows identifying whether a specific CpG-dinucleotide was methylated or not, and thereby provides an accurate value for the percentage of methylated CpG-dinucleotides of a given CpG-dinucleotide.

[0068] The COBRA assay is a quantitative technique to determine DNA methylation levels at specific gene loci in small amounts of genomic DNA. In the COBRA assay, restriction enzyme digestion is used to reveal methylation dependent sequence differences in PCR products of sodium bisulfite-treated DNA. Methylation levels in the original DNA sample are represented by the relative amounts of digested and undigested PCR product in a linearly quantitative fashion across a wide spectrum of DNA methylation levels. The COBRA assay is easy to use and provides quantitative accuracy.

[0069] In the COBRA assay, methylation-dependent sequence differences are introduced into the genomic DNA by sodium bisulfite treatment and subsequent PCR amplification of the bisulfite treated DNA. This combination of bisulfite treatment and PCR amplification results in conversion of unmethylated cytosine residues to thymine and of methylated cytosine residues to cytosine. This sequence conversion can lead to methylation dependent creation of new restriction enzyme sites or it can lead to the methylation dependent retention of pre-existing restriction enzyme sites such as, for example, BstUI (CGCG). The primers used in the PCR amplification reaction do not contain CpG dinucleotides so that the amplification step does not discriminate between templates according to their original methylation status. In the mixed population of DNA fragments resulting from said PCR, the fraction that has a newly created or retained restriction site that contains a CpG(s) directly therefore reflects the percentage of DNA methylation at that site in the original genomic DNA.

[0070] Notwithstanding that virtually any method for analyzing the methylation status of a given CpG-dinucleotide can be employed for analyzing the methylation status of at least one of the CpG-dinucleotides within a region of about 100,000 bp upstream and/or downstream of at least one of the CpG-dinucleotides selected from the group consisting of GRM7-CpG-site #1, CASR-CpG-site #1, PRAMEF2-CpG-site #1, SELP-CpG-site #1, CASP14-CpG-site #1, and KRTAP13-3-CpG-site #1, the methylation status can, for example, be determined by a direct sequence analysis of bisulfite-treated DNA.

[0071] In an embodiment of the present invention, the methylation status of at least one of the CpG-dinucleotides can, for example, be selected from the group consisting of GRM7-CpG-site #1, CASR-CpG-site #1, PRAMEF2-CpG-site #1, SELP-CpG-site #1, CASP14-CpG-site #1, and KRTAP13-3-CpG-site #1 is determined by pyrosequencing of bisulfite-treated DNA.

[0072] In animals, DNA methylation predominantly involves the addition of a methyl group to the carbon-5 position of cytosine residues of the dinucleotide CpG, and is implicated in repression of transcriptional activity. Treatment of DNA with sodium bisulfite converts cytosine residues to uracil, but leaves 5-methylcytosine residues unaffected. Sodium bisulfite treatment thus introduces specific changes in the DNA sequence that depend on the methylation status of individual cytosine residues, yielding single-nucleotide resolution information about the methylation status of a segment of DNA.

[0073] In an embodiment of the present invention, methylation of the at least one CpG-dinucleotide can, for example, be determined by sequence analysis of bisulfite treated DNA.

[0074] The method of methylation analysis utilizing sequence analysis of bisulfite-treated DNA involves bisulfite treatment of the DNA to be analyzed, PCR amplification of the bisulfite treated DNA, cloning of the amplification product, and standard dideoxynucleotide DNA sequencing of the cloned DNA fragments to directly determine the nucleotides resistant to bisulfite conversion. Primers for PCR amplification can, for example, be designed to be strand-specific but not methylation-specific, i.e., the nucleotide sequence of the primers do not, for example, comprise a sequence corresponding to a nucleotide sequence including a CpG dinucleotide. The preferred primers for PCR amplification thus flank, but do not involve, the methylation site or methylation sites of interest. In an embodiment of the present invention, at least one or both of the forward primer and the reverse primer for PCR amplification may, for example, cover one or more CpG-dinucleotides. To be strand specific and to allow amplification of methylated as well as non-methylated DNA fragments, a mixture of primers may be utilized, wherein the mixture of strand primers consists of primers having a pyrimidine nucleotide (Y) for the cytosine of the CpG dinucleotide within the DNA fragment to be amplified and covered by said strand primer, i.e., a C for amplification of the DNA fragment which is methylated at said C, or a T for amplification of said DNA fragment which is not methylated at the C. The PCR amplification will therefore amplify both methylated and unmethylated sequences, in contrast to methylation-specific PCR. All sites of unmethylated cytosines are displayed as thymines in the resulting amplified sequence of the sense strand, and as adenines in the amplified antisense strand. This method requires cloning of the PCR products prior to sequencing for adequate sensitivity. Nested PCR methods can alternatively be used to enhance the product for sequencing.

[0075] Pyrosequencing may also be used to analyze bisulfite-treated DNA without using methylation-specific PCR. Following PCR amplification of the region of interest, pyrosequencing is used to determine the bisulfite-converted sequence of specific CpG sites in the region. The status of C-to-T at individual sites can be determined quantitatively based on the amount of C and T incorporation during the sequence extension.

[0076] In an embodiment of the present invention, methylation of the at least one of the genes selected from the group consisting of GRM7, CASR, PRAMEF2, SELP, CASP14, and KRTAP13-3 can, for example, be determined by combined bisulfite restriction analysis (COBRA assay) where the COBRA-assay can be employed.

[0077] The method of determining the replicative senescence status of a cell can be used to determine whether a cell culture comprising cells is suitable for therapeutic use. In an embodiment of the present invention, a method is provided for identifying a cell culture which is suitable for therapeutic use. The method comprises the steps of determining the methylation status, i.e., the status of methylated versus non-methylated versions of corresponding DNA molecules, by determining the methylation status of least one of the CpG-dinucleotides within a region of about 100,000 basepairs (bp) upstream and/or downstream of at least one of the CpG-dinucleotides selected from the group consisting of GRM7-CpG-site #1, CASR-CpG-site #1, PRAMEF2-CpG-site #1, SELP-CpG-site #1, CASP14-CpG-site #1, and KRTAP13-3-CpG-site #1 for multiple corresponding DNA molecules, and of comparing the methylation status of each of the at least one CpG-dinucleotides investigated with a reference methylation status of the respective CpG-dinucleotide, whereby the replicative senescence status is determined.

[0078] In an embodiment of the present invention, the method comprises determining the methylation status by determining the methylation status of least one of the CpG-dinucleotides within a region of about 50,000 bp upstream and/or downstream of at least one of the CpG-dinucleotides selected from the group consisting of GRM7-CpG-site #1, CASR-CpG-site #1, PRAMEF2-CpG-site #1, SELP-CpG-site #1, CASP14-CpG-site #1, and KRTAP13-3-CpG-site #1 for multiple corresponding DNA molecules. The method can, for example, comprise determining the methylation status by determining the methylation status of at least one of the CpG-dinucleotides within a region of about 40,000 bp upstream and/or downstream, of about 30,000 bp upstream and/or downstream, of about 20,000 bp upstream and/or downstream, of about 10,000 bp upstream and/or downstream, of about 5,000 bp upstream and/or downstream, of about 3,000 bp upstream and/or downstream, of about 1,000 bp upstream and/or downstream of at least one of the CpG-dinucleotides selected from the group consisting of GRM7-CpG-site #1, CASR-CpG-site #1, PRAMEF2-CpG-site #1, SELP-CpG-site #1, CASP14-CpG-site #1, and KRTAP13-3-CpG-site #1 for multiple corresponding DNA molecules. The method can, for example, comprise determining the methylation status by determining the methylation status of least one of the CpG-dinucleotides selected from the group consisting of the CpG-dinucleotides of the GRM7 gene, the CASR gene, the PRAMEF2 gene, the SELP gene, the CASP14 gene, and the KRTAP13-3 gene. The method can, for example, comprise determining the methylation status by determining the methylation status of least one of the CpG-dinucleotides selected from the group consisting of GRM7-CpG-site #1, CASR-CpG-site #1, PRAMEF2-CpG-site #1, SELP-CpG-site #1, CASP14-CpG-site #1, and KRTAP13-3-CpG-site #1.

[0079] In an embodiment of the method according to the present invention, the cells can, for example, be mesenchymal stromal cells. In embodiment of the method according to the present invention, the cells can, for example, be induced pluripotent stem cells.

[0080] The suitability of a cell culture for therapeutic use can be identified by determining the methylation status of a single CpG-dinucleotides within a region of about 50,000 bp upstream and/or downstream of at least one of the CpG-dinucleotides selected from the group consisting of GRM7-CpG-site #1, CASR-CpG-site #1, PRAMEF2-CpG-site #1, SELP-CpG-site #1, CASP14-CpG-site #1, and KRTAP13-3-CpG-site #1 for multiple corresponding DNA molecules. The methylation status of two, three, four, five, or six different CpG-dinucleotides is determined, wherein the two, three, four, five, or six CpG-dinucleotides are chosen from different DNA molecules of the group consisting of DNA molecules comprising GRM7-CpG-site #1, CASR-CpG-site #1, PRAMEF2-CpG-site #1, SELP-CpG-site #1, CASP14-CpG-site #1, and KRTAP13-3-CpG-site #1. The methylation status of two, three, four, five, or all six different CpG-dinucleotides selected from the group consisting of GRM7-CpG-site #1, CASR-CpG-site #1, PRAMEF2-CpG-site #1, SELP-CpG-site #1, CASP14-CpG-site #1, and KRTAP13-3-CpG-site #1 can, for example, be determined for multiple corresponding DNA. The more genes of the group involved in determining the methylation status, the more precise the determination of the replicative senescence status will be.

[0081] The methylation status can be determined by one or more suitable methods selected from the group consisting of methylation specific PCR, sequence analysis of bisulfite-treated DNA, CHIP-sequencing, Methyl-CAP-sequencing, Next-Generation-Sequencing, COBRA-Assay, and methylation-specific restriction patterns. The methylation status can, for example, be determined by pyrosequencing bisulfite-treated DNA as described in more detail herein above, which allows identifying whether a specific CpG-dinucleotide was methylated or not, and thereby provides an accurate value for the percentage of methylated CpG-dinucleotides of a given CpG-dinucleotide.

[0082] In an embodiment of the present invention, a use of at least one of the DNA molecules is provided comprising at least one CpG dinucleotide within a region of about 100,000 bp upstream and/or downstream of at least one of the CpG-dinucleotides selected from the group consisting of GRM7-CpG-site #1, CASR-CpG-site #1, PRAMEF2-CpG-site #1, SELP-CpG-site #1, CASP14-CpG-site #1, and KRTAP13-3-CpG-site #1 for determining the replicative senescence status of a cell. In an embodiment of the present invention, determining the replicative senescence status of induced pluripotent stem cells can, for example, be used to quantify the reprogramming efficiency. In an embodiment of the present invention, a use of at least one of the DNA molecules is provided comprising at least one CpG dinucleotide within a region of about 100,000 bp upstream and/or downstream of at least one of the CpG-dinucleotides selected from the group consisting of GRM7-CpG-site #1, CASR-CpG-site #1, PRAMEF2-CpG-site #1, SELP-CpG-site #1, CASP14-CpG-site #1, and KRTAP13-3-CpG-site #1 for identifying a cell culture which is suitable for therapeutic uses.

[0083] In an embodiment of the present invention, the use for determining the replicative senescence status of a cell, and the use for identifying a cell culture which is suitable for therapeutic use can, for example, comprise the use of at least one DNA molecule comprising at least one CpG-dinucleotide within a region of about 50,000 bp upstream and/or downstream of at least one of the CpG-dinucleotides selected from the group consisting of GRM7-CpG-site #1, CASR-CpG-site #1, PRAMEF2-CpG-site #1, SELP-CpG-site #1, CASP14-CpG-site #1, and KRTAP13-3-CpG-site #1 for multiple corresponding DNA molecules. Any one of the uses can, for example, comprise the use of at least one DNA molecule comprising at least one CpG-dinucleotide within a region of about 40,000 bp upstream and/or downstream, of about 30,000 bp upstream and/or downstream, of about 20,000 bp upstream and/or downstream, of about 10,000 bp upstream and/or downstream, of about 5,000 bp upstream and/or downstream, of about 3,000 bp upstream and/or downstream, or, of about 1,000 bp upstream and/or downstream of at least one of the CpG-dinucleotides selected from the group consisting of GRM7-CpG-site #1, CASR-CpG-site #1, PRAMEF2-CpG-site #1, SELP-CpG-site #1, CASP14-CpG-site #1, and KRTAP13-3-CpG-site #1 for multiple corresponding DNA molecules. The method can, for example, comprise determining the methylation status by determining the methylation status of least one of the CpG-dinucleotides selected from the group consisting of the CpG-dinucleotides of the GRM7 gene, the CASR gene, the PRAMEF2 gene, the SELP gene, the CASP14 gene, and the KRTAP13-3 gene. The method can, for example, comprise determining the methylation status by determining the methylation status of at least one of the CpG-dinucleotides selected from the group consisting of GRM7-CpG-site #1, CASR-CpG-site #1, PRAMEF2-CpG-site #1, SELP-CpG-site #1, CASP14-CpG-site #1, and KRTAP13-3-CpG-site #1.

[0084] GRM7 denotes the human metabotropic glutamate receptor gene, namely, the gene for the isoform b precursor which is located on chromosome 3 at p26.1. GRM7 is registered under gene ID: 2917 in the NCBI Gene database. The first GRM7 transcript variant (SEQ ID No. 25) is registered in the NCBI Gene Bank database under accession no. NM_{—}000844. The second GRM7 transcript variant (SEQ ID NO: 26) is registered in the NCBI Gene Bank database under accession no. NM_{—}181874.

[0085] CASR denotes the human calcium-sensing receptor gene which is located on chromosome 3 at q21.1. CASR is registered under gene ID: 846 in the NCBI Gene database. The first CASR transcript variant (SEQ ID No. 27) is registered in the NCBI Gene Bank database under accession no. NM_{—}001178065. The CASR second transcript variant (SEQ ID NO: 28) is registered in the NCBI Gene Bank database under accession no. NM_{—}000388.

[0086] PRAMEF2 denotes the human gene for PRAME family member 2 which is located on chromosome 1 at p36.21. PRAMEF2 is registered under gene ID: 65122 in the NCBI Gene database. The PRAMEF2 transcript variant (SEQ ID No. 29) is registered in the NCBI Gene Bank database under accession no. NM_{—}023014.

[0087] SELP denotes the human selectin P precursor gene which is located on chromosome 1 at q24.2. SELP is registered under gene ID: 6403 in the NCBI Gene database. The SELP transcript (SEQ ID No. 30) is registered in the NCBI Gene Bank database under accession no. NM_{—}003005.

[0088] CASP14 denotes the human gene encoding the caspase 14 precursor. This gene is located on chromosome 19 at p13.12. CASP14 is registered under gene ID: 23581 in the NCBI Gene database. The CASP14 transcript (SEQ ID No. 31) is registered in the NCBI Gene Bank database under accession no. NM_{—}012114.

[0089] KRTAP13-3 denotes the human gene for the keratin associated protein 13-3, the gene being located on chromosome 21 at q22.11. KRTAP13-3 is registered under gene ID: 337960 in the NCBI Gene database. The KRTAP13-3 transcript (SEQ ID No. 32) is registered in the NCBI Gene Bank database under accession no. NM_{—}181622.

[0090] In an embodiment of the present invention, a kit-of-parts (kit) is provided for determining the replicative senescence status of a cell. In an embodiment of the present invention, a kit is provided for identifying a cell culture which is suitable for therapeutic uses. The kit for determining the replicative senescence status of a cell, and the kit for identifying a cell culture which is suitable for therapeutic uses contain means for determining the methylation status of at least one of the CpG-dinucleotides within a region of about 100,000 basepairs (bp) upstream and/or downstream of at least one of the CpG-dinucleotides selected from the group consisting of GRM7-CpG-site #1, CASR-CpG-site #1, PRAMEF2-CpG-site #1, SELP-CpG-site #1, CASP14-CpG-site #1, and KRTAP13-3-CpG-site #1 for multiple corresponding DNA molecules.

[0091] In an embodiment of the present invention, the kits can, for example, comprise parts rendering the kit suitable for determining the methylation status by determining the methylation status of least one of the CpG-dinucleotides within a region of about 50,000 bp upstream and/or downstream of at least one of the CpG-dinucleotides selected from the group consisting of GRM7-CpG-site #1, CASR-CpG-site #1, PRAMEF2-CpG-site #1, SELP-CpG-site #1, CASP14-CpG-site #1, and KRTAP13-3-CpG-site #1 for multiple corresponding DNA molecules. The kits can, for example, comprise parts for determining the methylation status by determining the methylation status of least one of the CpG-dinucleotides within a region of about 40,000 bp upstream and/or downstream, of about 30,000 bp upstream and/or downstream, of about 20,000 bp upstream and/or downstream, of about 10,000 bp upstream and/or downstream, of about 5,000 bp upstream and/or downstream, of about 3,000 bp upstream and/or downstream, or, of about 1,000 bp upstream and/or downstream of at least one of the CpG-dinucleotides selected from the group consisting of GRM7-CpG-site #1, CASR-CpG-site #1, PRAMEF2-CpG-site #1, SELP-CpG-site #1, CASP14-CpG-site #1, and KRTAP13-3-CpG-site #1 for multiple corresponding DNA molecules. The kits can, for example, comprise parts for determining the methylation status by determining the methylation status of at least one of the CpG-dinucleotides selected from the group consisting of the CpG-dinucleotides of the GRM7 gene, the CASR gene, the PRAMEF2 gene, the SELP gene, the CASP14 gene, and the KRTAP13-3 gene. The kits can, for example, comprise parts for determining the methylation status by determining the methylation status of at least one of the CpG-dinucleotides selected from the group consisting of GRM7-CpG-site #1, CASR-CpG-site #1, PRAMEF2-CpG-site #1, SELP-CpG-site #1, CASP14-CpG-site #1, and KRTAP13-3-CpG-site #1.

[0092] In an embodiment of the present invention, the kits can, for example, comprise at least one oligonucleotide primer for analyzing at least one of the CpG-dinucleotides selected from the group consisting of GRM7-CpG-site #1, CASR-CpG-site #1, PRAMEF2-CpG-site #1, SELP-CpG-site #1, CASP14-CpG-site #1, and KRTAP13-3-CpG-site #1, the at least one oligonucleotide primer being adapted for amplifying and/or analyzing a nucleic acid molecule comprising at least one of the nucleotide sequences selected from the group consisting of SEQ ID NO: 1 to SEQ ID NO: 6.

[0093] In embodiments of the kits of the present invention, the kits can, for example, comprise at least one oligonucleotide primer selected from the group consisting of SEQ ID NO: 7 to SEQ ID NO: 24.

[0094] In an embodiment of the present invention, the kits can, for example, further comprise at least one reaction buffer and/or reagents for at least one method selected from the group consisting of PCR-amplification, bisulfite-conversion of DNA, DNA-sequencing, preferably DNA-pyrosequencing, Next-Generation-Sequencing, and COBRA-assay. These embodiments provide the advantage that all or at least almost all buffers and reagents that are necessary for determining the methylation status are provided with the kit.

[0095] While the present invention has been illustrated and described in detail in the drawings and the above description, the drawings and the description are to be considered illustrative or exemplary and not restrictive; the present invention is therefore not limited to the disclosed embodiments.

[0096] Other variations to the disclosed embodiments can be understood and effected by persons skilled in the art in practicing the claimed present invention, from a study of the drawings, the disclosure, and the appended claims. In the claims, the word “comprising” does not exclude other elements or steps, and the indefinite article “a” or “an” does not exclude a plurality. The mere fact that certain measures are recited in mutually different dependent claims does not indicate that a combination of these measures cannot be used to advantage. Any reference signs in the claims should not be construed to be limiting as to scope.

### Example 1

### Isolation of Primary Cells

[0097] All samples were taken after written consent and have been specifically approved by local ethic committees on the use of human subjects. Fibroblasts were isolated from dermis (permit number of ethics committee: #EK173/07, Aachen). MSC-AT were isolated from subcutaneous adipose tissue derived from surgical interventions (#EK173/07, Aachen). MSC-BM were isolated from bone marrow aspirations from the iliac crest of healthy donors for allogeneic transplantation or from the caput femoris after hip fracture (#EK128/09, Aachen; #076/2007 and #348/2004, Heidelberg).

### Culture Conditions and Long-Term Growth Curves

[0098] Standard culture medium consisted of DMEM medium (PAA, Cölbe, Germany; 1 g/L glucose) with L-glutamine (PAA), penicillin/streptomycin (PAA) supplemented with either 10% fetal calf serum (FCS; Biochrom, Berlin, Germany) or 10% human platelet lysate. Alternatively, a medium consisting of 58% DMEM-LG (Cambrex, Apen, Germany), 40% MCDB201 (Sigma, Deisenhofen, Germany), 2% FCS (Stemcell Technologies, Vancouver, Canada), 2 mM L-glutamine, 100 U/ml Pen/Strep (Gibco, Eggenstein, Germany), 1% insulin transferrin selenium, 1% linoleic acid bovine serum albumin, 10 nM dexamethasone, 0.1 mM L-ascorbic-acid-2-phosphate (all from Sigma) supplemented with platelet derived growth factor (PDGF) and epidermal growth factor (EGF; both 10 ng/ml, R&D Systems, Wiesbaden, Germany) was used as described before.

[0099] Cells were always harvested by trypsinisation upon 80% confluent growth, counted with a Neubauer chamber (Brand, Wertheim, Germany) or with a CASY cell counter (Schärfe System, Reutlingen, Germany) and re-seeded at a density of either 5,000 cells/cm² (fibroblasts and MSC-AT) or 10,000 cells/cm² (MSC-AT and MSC-BM). Cell Population doublings per passage (PDP) and cumulative population doublings (cPD) were calculated as described before.

### Quality Control of Cell Preparations

[0100] Surface marker expression was analyzed on a FACS canto II (Becton Dickinson Biosciences [BD], Heidelberg, Germany) upon staining with the following antibodies as described before: CD14-allophycocyanin (APC, clone M5E2, BD), CD29-phycoerythrin (PE, clone MAR4, BD), CD31-PE (clone WM59, BD), CD34-APC (clone 8G12, BD), CD45-APC (clone HI30, BD), CD73-PE (clone AD2, BD), CD90-APC (clone 5E10, BD) and CD105-fluorescein isothiocyanate (FITC, clone MEM-226, ImmunoTools, Friesoythe, Germany). Osteogenic, adipogenic and chondrogenic differentiation potential of fibroblasts, MSC-AT and MSC-BM was determined as described before.

### Senescence Tests Based on the Lysosomal Compartment

[0101] Expression of pH dependent senescence associated β-galactosidase (SA-β-gal) activity was simultaneously analyzed at different passages using the SA-β-gal staining kit (Cell Signaling Technology, Boston, Mass.) or by flow cytometry with the fluorogenic substrate 5-dodecanoylaminofluorescein di-beta-D-galactopyranoside (C12FDG). Lysosomal and mitochondrial content was analyzed upon 45 min staining of living cells with LysoTracker Red DND-99 (75 nM) and MitoTracker Green FM (100 nM, both Invitrogen/Molecular Probes, Eugene, Oreg., USA). Fluorescence was detected with a FACS Canto II or a Leica DM IL LED fluorescence microscope (Leica, Wetzlar, Germany).

### DNA Isolation and Bisulfite Conversion

[0102] Genomic DNA was isolated from 10⁶ cells using the QIAGEN DNA Blood Midi-Kit. DNA quality was assessed with a NanoDrop ND-1000 spectrometer (NanoDrop Technologies, Wilmington, USA) and gel electrophoresis. 600 ng DNA were subsequently bisulfite converted using the EpiTect Bisulfite Kit (Qiagen, Hilden, Germany).

### DNA Methylation Profiling

[0103] DNA methylation profiles were analyzed using the HumanMethylation27 Bead Chip according to the manufacturer's instructions (Illumina, San Diego, USA). During hybridization, the DNA molecules anneal to two different bead types with locus-specific DNA oligomers (one corresponds to the methylated (C) and the other to the unmethylated (T) state). Allele-specific primer annealing was followed by single-base extension using DNP- and Biotin-labeled ddNTPs. After extension, the array was fluorescently stained, scanned, and the intensities of the unmethylated and methylated bead types measured. Hybridization and initial data analysis with the BeadStudio Methylation Module were performed at the DKFZ Gene Core Facility in Heidelberg. Raw data of all hybridizations were deposited in NCBIs Gene Expression Omnibus and are accessible through GEO Series accession numbers: GSE17448 (MSC-BM); GSE26519 (MSC-AT); GSE22595 (fibroblasts) and GSE29661 (fibroblasts and MSC-AT).

### Analysis of DNA-Methylation Profiles

[0104] Raw data of new datasets and recently published datasets were quantile normalized to minimize chip effects. Principal components analysis (PCA) was calculated with prcomp in R package stats. For selection of relevant CpG sites, Pavlidis Template Matching performed with the MultiExperiment Viewer (MeV, TM4.6) was used. Templates were therefore specified that either corresponded to: 1) the passage numbers of the samples, 2) cPD, or 3) days in culture. The dataset was then searched for matches to the template, based on the Pearson Correlation between the template and methylation values of the data set. For subsequent analysis, only CpG sites with highly significant hyper- or hypo-methylation according to the three corresponding templates (P<10⁻¹¹) were considered. Based on this analysis, six CpG sites (for simplicity, they were termed by their corresponding genes: GRM7, CASR, PRAMEF2, SELP, CASP14 and KRTAP13-3) were selected. Methylation levels of these CpG sites were plotted against passage number for linear regression analysis with EXCEL 2007 (Microsoft). Based on these linear regressions, the state of cellular aging (N) for each of the six CpG sites (i) was calculated by inserting the specific DNA-methylation levels for each gene (β):

Nᵢ=(βᵢ−Aᵢ)/Bᵢ

where A is the Y-axis intercept and B is the slope of the corresponding CpG site in the training group. The mean and standard deviation of the predictions of the six individual CpG sites were subsequently determined as a measure of cellular aging.

### Pyrosequencing

[0105] Independent DNA samples of known passage were subsequently bisulfite converted and analyzed by pyrosequencing with regard to the six specific CpG sites. Pyrosequencing was performed at Varionostic GmbH (Ulm, Germany). Primers and sequencing primers are provided in Table 1. Other primers than those disclosed herein may be used for amplifying and/or sequencing the respective nucleic acids.

TABLE 1
Primer for Amplification of Gene
Fragments and Sequencing

| | Gene | | SEQ |
|---|---|---|---|
| | symbol | Nucleotide sequence | ID NO: |
| Forward | GRM7 | TTGGGATTATTGTTGATTT | 7 |
| primer | CASR | TGTAATAGGTATTTGGTTGTAGT | 8 |
| | PRAMEF2 | TTTGAGGGTATTTAGAAGAGAT | 9 |
| | SELP | AGAAGGTAGAAAATTAGTAGAGTT | 10 |
| | CASP14 | TTGGAGATTTAGTGAGATAATA | 11 |
| | KRTAP13-3 | GAGATTTGTTGGAGGTTTAA | 12 |
| Reverse | GRM7 | CCCCTACTACCTACTAAAAATA | 13 |
| primer | CASR | CCCAAACTCTTACTCATTCTA | 14 |
| | PRAMEF2 | TCCCTAACTAACTAACTACTAATC | 15 |
| | SELP | CAACATAAAACTCCATAACTA | 16 |
| | CASP14 | AACAAAACAAATAACCCATATA | 17 |
| | KRTAP13-3 | CCCAATAAAAAACAACTCC | 18 |

| | | | |
|---|---|---|---|
| Sequencing | GRM7 | TACCTACTAAAAATACTCCT | 19 |
| primer | CASR | TTGGTTGTAGTTAGGAA | 20 |
| | PRAMEF2 | TAGAATTTTGTAAAGTGAG | 21 |
| | SELP | AGGTAAAGGTTTAGAAAG | 22 |
| | CASP14 | TATTTTTTTGAGATGGT | 23 |
| | KRTAP13-3 | ATTTTTGTTTGATTATGTA | 24 |

### Quantitative Real-Time PCR Analysis

[0106] Expression of the six differentially methylated genes (GRM7, CASR, PRAMEF2, SELP, CASP14 and KRTAP13-3) was analyzed by quantitative real-time PCR (qRT-PCR) using the StepOne™ Instrument (Applied Biosystems [AB], Applera Deutschland GmbH, Darmstadt, Germany). Total RNA was isolated with the miRNeasy Mini Kit (Qiagen, Hilden, Germany) according to the manufacturer's instructions and reversely transcribed. QRT-PCR reactions were performed using Taqman® Gene Express Assays. Gene expression levels were normalized to GAPDH and 18s RNA expression.

Validation with Methylation Profiles

[0107] The epigenetic methylation signature was tested on published datasets of other groups. These raw data were generously provided at the public repositories GEO and Array Express. All studies were considered with the HumanMethylation27 BeadChip. None of them provided detailed information on long-term culture. Datasets of either freshly-isolated cells from dermis and epidermis (E-MTAB-202 as described in Gronniger, E. et al., Aging and chronic sun exposure cause distinct epigenetic changes in human skin, PLoS. Genet. 6, e1000971 (2010)); ovarial epithelium (GSE25033 as described in Bauerschlag D O et al., Progression-Free Survival in Ovarian Cancer Is Reflected in Epigenetic DNA Methylation Profiles, Oncology 80, pp. 12-20 (2011)); cervical smear (GSE20080 as described in Teschendorff, A. E. et al., Age-dependent DNA methylation of genes that are suppressed in stem cells is a hallmark of cancer, Genome Res. 20, pp. 440-446 (2010)); cord blood (GSE26683 as described in Novakovic, B. et al., Wide ranging DNA methylation differences of primary trophoblast cell populations and derived-cell lines: implications and opportunities for understanding trophoblast function, Mol. Hum. Reprod. (2011)); and, peripheral blood (GSE25301 as described in Wang, X. et al, Obesity related methylation changes in DNA of peripheral blood leukocytes, BMC. Med. 8, 87 (2010)) or datasets of established cell lines derived from solid cancer (cell lines SW48 and MCF-7; GSE26683 as described in Novakovic, B. et al., Wide ranging DNA methylation differences of primary trophoblast cell populations and derived-cell lines: implications and opportunities for understanding trophoblast function, Mol. Hum. Reprod. (2011)), squamous cell carcinoma (GSE24091), ovarian carcinoma (GSE25033 as described in Bauerschlag, D O et al., Progression-Free Survival in Ovarian Cancer Is Reflected in Epigenetic DNA Methylation Profiles, Oncology 80, pp. 12-20 (2011)), transformed placenta/trophoblast (GSE26683 as described in Novakovic, B. et al., Wide ranging DNA methylation differences of primary trophoblast cell populations and derived-cell lines: implications and opportunities for understanding trophoblast function. Mol. Hum. Reprod. (2011)), multiple myeloma/MGUS (GSE21304 as described in Walker, B. A. et al., Aberrant global methylation patterns affect the molecular pathogenesis and prognosis of multiple myeloma, Blood 117, pp. 553-562 (2011)), lymphoma (GSE26133 as described in Bell, J. T. et al., DNA methylation patterns associate with genetic and gene expression variation in HapMap cell lines, Genome Biol. 12, R10 (2011)) and pluripotent cell lines (GSE24676 as described in Nishino, K. et al., DNA Methylation Dynamics in Human Induced Pluripotent Stem Cells over Time, PLoS. Genet. 7, e1002085 (2011)) were used. For further analysis, only beta-values of the six specific CpG-dinucleotides and used these for the predictive model described above were extracted.

[0108] The results of the analysis are briefly summarized in FIG. 1. FIG. 1 illustrates that there is a clear and unequivocal correlation of the number of passages the cells went through and the methylation status of each one of the 6 CpG-dinucleotides selected from the group consisting of GRM7-CpG-site #1, CASR-CpG-site #1, PRAMEF2-CpG-site #1, SELP-CpG-site #1, CASP14-CpG-site #1, and KRTAP13-3-CpG-site #1. GRM7-CpG-site #1 and CASR-CpG-site #1 become hypermethylated during ongoing passages of in in-vitro culture and thus while becoming replicative senescent, wherein the degree of hypermethylation corresponds to the number of cell passage. In contrast, the CpG-dinucleotides PRAMEF2-CpG-site #1, SELP-CpG-site #1, CASP14-CpG-site #1, and KRTAP13-3-CpG-site #1 become hypomethylated during ongoing passages of in in-vitro culture and thus while becoming replicative senescent, wherein the degree of hypomethylation corresponds to the number of cell passage.

[0109] FIG. 2 depicts the genomic sequences of the six CpG-dinucleotides, namely GRM7-CpG-site #1, CASR-CpG-site #1, PRAMEF2-CpG-site #1, SELP-CpG-site #1, CASP14-CpG-site #1, and KRTAP13-3-CpG-site #1, which were used for establishing the epigenetic senescence signature. FIG. 2 shows the respective CpG-dinucleotides and 20 nucleotides of the genomic DNA upstream and 20 nucleotides of the genomic DNA downstream of each of said CpG-dinucleotides. The nucleotide sequences shown in FIG. 2 correspond to the nucleotide sequences set forth in SEQ ID NOs: 1 to 6.

[0110] FIG. 3 shows the results where independent cell preparations were used for validation of the senescence-signature by pyrosequencing of the six CpG sites (GRM7-CpG-site #1, CASR-CpG-site #1, PRAMEF2-CpG-site #1, SELP-CpG-site #1, CASP14-CpG-site #1, and KRTAP13-3-CpG-site #1). The beta-values were used for the above-mentioned linear regression models to predict the number of passages. The graph in FIG. 3 clearly shows that the predicted passage number accurately identifies the real passage number of each cell culture.

[0111] FIG. 4 illustrates that the epigenetic replicative senescence signature is applicable to different cell types and tissues. DNA-methylation datasets were retrieved from public data repositories. DNA-methylation level at the six CpG-dinucleotides (GRM7-CpG-site #1, CASR-CpG-site #1, PRAMEF2-CpG-site #1, SELP-CpG-site #1, CASP14-CpG-site #1, and KRTAP13-3-CpG-site #1) can clearly separate freshly isolated cells and culture expanded cell lines (mean and standard deviation of the different samples are provided).

[0112] FIGS. 5 and 6 demonstrate that CpG-dinucleotides within a region of about 50,000 bp upstream and/or downstream of at least one of the CpG-dinucleotides selected from the group consisting of GRM7-CpG-site #1 (SEQ ID No. 33), CASR-CpG-site #1 (SEQ ID No. 34), PRAMEF2-CpG-site #1 (SEQ ID No. 35), SELP-CpG-site #1 (SEQ ID No. 36), CASP14-CpG-site #1 (SEQ ID No. 37), and KRTAP13-3-CpG-site #1 (SEQ ID No. 38) are all suitable to determine the senescence status of cell populations. All CpG-sites within the depicted regions are continuously methylated or demethylated with increasing senescence of the cells, i.e., a linear change of the methylation status of these CpG-dinucleotides can be observed during proceeding senescence of the cells.

[0113] The data show that the replicative senescence status of cells can be accurately determined by particular epigenetic features.

[0114] The present invention provides the advantages that it is not necessary to determine the expression of specific marker genes in order to assess the replicative senescence of a cell or the cells of a cell culture. Comparing the methylation status obtained with a reference methylation status can moreover be done in that the methylation status as determined is inserted into a formula for linear regression. It is thereby possible to determine the replicative senescence status of a cell or of the cells within a cell culture even if no positive or negative control is available. In addition, the methods of the present invention are reliable as the results have been proven to be independent from the persons handling the cell cultures, any growth conditions and the like.

### Example 2

[0115] In this approach, all available DNAm data with the Infinium HumanMethylation27 BeadChip were combined. This platform facilitates simultaneous analysis of DNAm at more than 27,000 CpG sites at single base resolution. Those CpG sites which reveal a linear increase in DNAm level over either subsequent passages, days in culture, or cumulative population doublings (cPDs), were subsequently identified and selected. Six specific CpG sites were identified by Pavlidis template matching which fulfilled these parameters. Analysis of DNAm at these CpG sites can conversely be used to predict the state of cellular aging. In the following sections, a step-by-step guidance for the usage of this Epigenetic Senescence Signature is provided.

### Material

### Biological Material

[0116] This method is applicable for different cell types, particularly for mesenchymal stromal cells (MSC) and fibroblasts. All cell preparations were isolated after written consent according to the guidelines of the local Ethics Committees. Bone marrow derived MSC (BM-MSC) were isolated from bone marrow aspirates (iliac crest; IC) of healthy donors for allogeneic transplantation (#348/2004, Heidelberg, Germany), from caput femoris (CF) after hip fracture or from tibia plateau (TP; #EK128/09, Aachen, Germany, and #076/2007, Heidelberg). Adipose-tissue derived MSC (AT-MSC) were isolated from lipoaspirates of healthy adult donors (#EK163/07, Aachen). Dermal fibroblasts (D-Fib) were isolated from patients undergoing plastic surgery (#EK173/07, Aachen). The following sections describe exemplarily culture expansion of BM-MSC in medium supplemented with 10% human platelet lysate (hPL).

### Human Platelet Lysate

[0117] Human platelet lysate (hPL) is generated by simple freeze-thaw procedures with thrombocyte concentrate units from healthy donors (provided by the blood bank, University Hospital, Aachen).

### Culture Medium and Passaging

[0118] 1. 500 mL laboratory bottle (Duran, Wertheim, Germany)
[0119] 2. 500 mL rapid-Filtermax, vacuum filtration unit (TPP, Trasadingen, Switzerland)
[0120] 3. 2 U/mL Heparin (Ratiopharm, Ulm, Germany)
[0121] 4. Dulbecco's Modified Eagles Medium-Low Glucose (DMEM-LG; PAA, Pasching, Austria)
[0122] 5. 2 mM L-glutamine (Sigma-Aldrich, München, Germany)
[0123] 6. 100 U/mL penicillin/streptomycin (pen/strep; Gibco, Invitrogen, Carlsbad, USA)
[0124] 7. 0.25% Trypsin-EDTA solution (1×) (Gibco)
[0125] 8. lx phosphate-buffered saline (PBS) (PAA)
[0126] 9. Tissue culture flasks 75 cm2 (Nunc Thermo Fisher Scientific, Langenselbold, Germany)
[0127] 10. Hemocytometer (Neubauer counting chamber, Brand, Wertheim, Germany)
[0128] 11. 0.4% Trypan Blue solution (Sigma)
[0129] 12. 15 and 50 mL Falcon tubes (BD)

### DNA Preparation

[0130] 1. QiaAmp DNA Blood Midi Kit (Qiagen, Hilden Germany)
[0131] 2. 15 mL Falcon tubes (BD)
[0132] 3. 0.5 mL Safelock tubes (Sarstedt, Nümbrecht, Germany)
[0133] 4. Nuclease-Free Water (Qiagen)
[0134] 5. Waterbath (70° C.)

### DNAm Analysis at Specific CpG Sites

[0135] This method is based on the DNAm level at six specific CpG sites. Various methods can be used for this purpose. These CpG sites can easily be selected from DNAm profiles with the Infinium HumanMethylation27 BeadChip. It is expected that it is alternatively possible to determine the DNAm level by MassARRAY assay. In the following sections; the specific analysis of pyrosequencing of bisulfide-treated DNA is used.

### Methods

### Long-Term Culture of Mesenchymal Stomal Cells

[0136] 1. Add L-glutamine, penicillin/streptomycin, heparin and human platelet lysate (10%) to the DMEM-LG medium to a final volume of 500 mL.
[0137] 2. Sterile-filter medium and store at 4° C. up to 2 weeks.
[0138] 3. Seed BM-MSC after isolation at a density of 5,000 cells/cm² into culture flasks.
[0139] 4. Upon 80% confluence, remove medium and wash cells with PBS twice.
[0140] 5. Add 1 mL of trypsin-EDTA solution and incubate at 37° C. for 1 minute.
[0141] 6. After cell detachment, stop trypsination by application of 5 mL culture medium.
[0142] 7. Transfer solution into 15 mL Falcon tube and centrifuge at 350×g for 7 minutes.
[0143] 8. Discard supernatant and resuspend pellet in 1 mL culture medium.
[0144] 9. Count cells in a Neubauer counting chamber after application of Trypan Blue dye for exclusion of dead cells.
[0145] 10. Re-seed cells at a density of 5,000 cells/cm².
[0146] 11. Document cell count for calculation of cumulative Population Doublings (see subheading 3.3).

### Calculation of Real Cumulative Population Doublings

[0147] 1. Calculate cumulative Population Doublings from the first passage until the destined number of passages by employing the following formula (FIG. 7):

cPD=sum_{i=1 . . . n} log₂(hi/si),
where n is the total number of passages; si is the number of cells seeded at passage i, and hi is the number of cells harvested in passage i.

### DNA Preparation and Bisulfide Conversion

[0148] 1. Isolate genomic DNA with the QiaAmp DNA Blood Midi Kit following the manufacturer's instructions.
[0149] 2. Elute DNA in 300 μL Nuclease-Free Water or in the provided Elution Buffer for long-term storage.
[0150] 3. Assess concentration and quality via photometric measurement and agarose gel electrophoresis.
[0151] 4. Bisulfide conversion

### DNA Methylation Analysis of the Six Specific CpG Sites

[0152] Analysis of the DNAm six specific CpG sites is the prerequisite for usage of the Epigenetic Senescence Signature. If DNAm profiles with the Illumina HumanMethylation27k Chip are available, these can be directly extracted by the IDs (corresponding gene names and sequences are also indicated—the relevant CpG sites are indicated in bold):

| | |
|---|---|
| 1. | GTGCTGGAGGTGCTCCTGTGCGCGCTGGCGGCGGCGGCGCGC |
| | (cg02332525; GRM7) |
| 2. | TGGCTGCAGCCAGGAAGGACCGCACGCCCTTTCGCGCAGGAG |
| | (cg17453778; CASR) |
| 3. | AGAAGGTGGTGACTTACCAGCGCTGGACTCACTTTGCAGAGT |
| | (cg03891191; PRAMEF2) |
| 4. | ACATAAAACTCCATGGCTATCGCTGTTCCTCACTTTCTGAAC |
| | (cg01459453; SELP) |
| 5. | CTCTTCTACCTAGGAGATGACGGGCTGGGGAAGCCATCTCAA |
| | (cg01999333; CASP14) |
| 6. | TGACTATGCATGTTGGGTCTCGGGGTTTTGGATCCAATAGCT |
| | (cg16431978; KRTAP13-3) |

[0153] DNAm can be alternatively specifically be determined by pyrosequencing as described above.

Analysis of the Epigenetic Senescence Signature with a Computer-Readable Program

[0154] For each CpG site, the corresponding DNAm values need to be inserted in the corresponding linear regression models (FIG. 8). These equations are described in Koch et al., Aging Cell 11, pp. 366-9 (2012). Predictions for cPDs are thereby generated for each individual CpG site and the mean of these is subsequently calculated for the final value (FIG. 9). To make this calculation easier, a software was designed where the DNAm values can easily be integrated. The input mask of this software is shown in FIG. 10.
[0155] 1. Type in the corresponding beta-values of the 6 CpG sites and press “Calculate” for the predictions.
[0156] 2. Compare results with the calculated real cPD of the cell preparations.

[0157] A multivariate model is alternatively provided which combines the six linear regressions into one equation:

Predicted cPD=45.89+(23.63*cg02332525)+(31.61*cg17453778)+(−53.70*cg03891191)+(14.86*cg01459453)+(−23.94*cg01999333)+(−10.34*cg16431978).

[0158] The corresponding beta-values for the six CpG sites must be inserted. This method generates similar results as the above-mentioned method (FIG. 10).

[0159] The present invention is not limited to embodiments described herein; reference should be had to the appended claims.

The application's sequence listing, which the Patent Office published only in electronic form, follows.

SEQUENCE LISTING (38 sequences)

SEQ ID NO: 1 - DNA, 42 bp, Homo sapiens
  methylation site (21)..(22): CpG dinucleotide within the GRM7 gene for methylation
gtgctggaggtgctcctgtgcgcgctggcggcggcggcgcgc

SEQ ID NO: 2 - DNA, 42 bp, Homo sapiens
  methylation site (21)..(22): CpG dinucleotide within the CASR gene for methylation
tggctgcagccaggaaggaccgcacgccctttcgcgcaggag

SEQ ID NO: 3 - DNA, 42 bp, Homo sapiens
  methylation site (21)..(22): CpG dinucleotide within the PRAMEF2 gene for methylation
agaaggtggtgacttaccagcgctggactcactttgcagagt

SEQ ID NO: 4 - DNA, 42 bp, Homo sapiens
  methylation site (21)..(22): CpG dinucleotide within the SELP gene for methylation
acataaaactccatggctatcgctgttcctcactttctgaac

SEQ ID NO: 5 - DNA, 42 bp, Homo sapiens
  methylation site (21)..(22): CpG dicnucleotide within the CASP14 gene for methylation
ctcttctacctaggagatgacgggctggggaagccatctcaa

SEQ ID NO: 6 - DNA, 42 bp, Homo sapiens
  methylation site (21)..(22): CpG dinucleotide within the KRTAP13-3 gene for methylation
tgactatgcatgttgggtctcggggttttggatccaatagct

SEQ ID NO: 7 - DNA, 19 bp, Artificial Sequence
  forward primer for amplification of a fragment of the bisulfite-treated human GRM7 gene
ttgggattattgttgattt

SEQ ID NO: 8 - DNA, 22 bp, Artificial Sequence
  reverse primer for amplification of a fragment of the bisulfite-treated human GRM7 gene
cccctactacctactaaaaata

SEQ ID NO: 9 - DNA, 20 bp, Artificial Sequence
  sequencing primer for sequence analysis of a fragment of the bisulfite-treated human GRM7 gene
tacctactaaaaatactcct

SEQ ID NO: 10 - DNA, 23 bp, Artificial Sequence
  forward primer for amplification of a fragment of the bisulfite-treated human CASR gene
tgtaataggtatttggttgtagt

SEQ ID NO: 11 - DNA, 21 bp, Artificial Sequence
  reverse primer for amplification of a frgment of the bisulfite-treated human CASR gene
cccaaactcttactcattcta

SEQ ID NO: 12 - DNA, 17 bp, Artificial Sequence
  sequencing primer for sequence analysis of a fragment of the bisulfite-treated human CASR gene
ttggttgtagttaggaa

SEQ ID NO: 13 - DNA, 22 bp, Artificial Sequence
  forward primer for amplification of a fragment of the bisulfite-treated human PRAMEF2 gene
tttgagggtatttagaagagat

SEQ ID NO: 14 - DNA, 24 bp, Artificial Sequence
  reverse primer for amplification of a fragment of the bisulfite-treated human PRAMEF2 gene
tccctaactaactaactactaatc

SEQ ID NO: 15 - DNA, 19 bp, Artificial Sequence
  sequencing primer for sequence analysis of a fragment of the bisulfite-treated human PRAMEF2 gene
tagaattttgtaaagtgag

SEQ ID NO: 16 - DNA, 24 bp, Artificial Sequence
  forward primer for amplification of a fragment of the bisulfite-treated human SELP gene
agaaggtagaaaattagtagagtt

SEQ ID NO: 17 - DNA, 21 bp, Artificial Sequence
  reverse primer for amplification of a fragment of the bisulfite-treated human SELP gene
caacataaaactccataacta

SEQ ID NO: 18 - DNA, 18 bp, Artificial Sequence
  sequencing primer for sequence analysis of a fragment of the bisulfite-treated humen SELP gene
aggtaaaggtttagaaag

SEQ ID NO: 19 - DNA, 22 bp, Artificial Sequence
  forward primer for amplification of a fragment of the bisullfite-treated human CSAP14 gene
ttggagatttagtgagataata

SEQ ID NO: 20 - DNA, 22 bp, Artificial Sequence
  reverse primer for amplification of a fragment of the bisulfite-treated human CSAP14 gene
aacaaaacaaataacccatata

SEQ ID NO: 21 - DNA, 17 bp, Artificial Sequence
  sequencing primer for sequence analysis of a fragment of the bisulfite-treated human CSAP14 gene
tatttttttgagatggt

SEQ ID NO: 22 - DNA, 20 bp, Artificial Sequence
  forward primer for amplification of a fragmentof the bisulfite-treated human KRTAP13-3 gene
gagatttgttggaggtttaa

SEQ ID NO: 23 - DNA, 19 bp, Artificial Sequence
  reverse primer for amplification of a fragment of the bisulfite-treated human KRTAP13-3 gene
cccaataaaaaacaactcc

SEQ ID NO: 24 - DNA, 19 bp, Artificial Sequence
  sequencing primer for sequence analysis of a fragment of the bisulfite-treated human KRTAP13-3 gene
atttttgtttgattatgta

SEQ ID NO: 25 - DNA, 4147 bp, Homo sapiens
agtgctgggctgttggagagagcgagcagcaagccggtgagcgcgagcgcggcgcgccggccggctaacccgagagcgcgaggcgccccaggctggcaggcgccgcgggacccctcaccctctctggtcgcccctccccggattcccccaccctccgtgcctgcaggagcccctgggctttcccggaggagctcgccctgaagggcccggacctcggcgagcccaccaccgttccctccagcgccgccgccgccaccgcagcagccggagcagcatggtccagctgaggaagctgctccgcgtcctgactttgatgaagttcccctgctgcgtgctggaggtgctcctgtgcgcgctggcggcggcggcgcgcggccaggagatgtacgccccgcactcaatccggatcgagggggacgtcaccctcggggggctgttccccgtgcacgccaagggtcccagcggagtgccctgcggcgacatcaagagggaaaacgggatccacaggctggaagcgatgctctacgccctggaccagatcaacagtgatcccaacctactgcccaacgtgacgctgggcgcgcggatcctggacacttgttccagggacacttacgcgctcgaacagtcgcttactttcgtccaggcgctcatccagaaggacacctccgacgtgcgctgcaccaacggcgaaccgccggttttcgtcaagccggagaaagtagttggagtgattggggcttcggggagttcggtctccatcatggtagccaacatcctgaggctcttccagatcccccagattagttatgcatcaacggcacccgagctaagtgatgaccggcgctatgacttcttctctcgcgtggtgccacccgattccttccaagcccaggccatggtagacattgtaaaggccctaggctggaattatgtgtctaccctcgcatcggaaggaagttatggagagaaaggtgtggagtccttcacgcagatttccaaagaggcaggtggactctgcattgcccagtccgtgagaatcccccaggaacgcaaagacaggaccattgactttgatagaattatcaaacagctcctggacacccccaactccagggccgtcgtgatttttgccaacgatgaggatataaagcagatccttgcagcagccaaaagagctgaccaagttggccattttctttgggtgggatcagacagctggggatccaaaataaacccactgcaccagcatgaagatatcgcagaaggggccatcaccattcagcccaagcgagccacggtggaagggtttgatgcctactttacgtcccgtacacttgaaaacaacagaagaaatgtatggtttgccgaatactgggaggaaaacttcaactgcaagttgacgattagtgggtcaaaaaaagaagacacagatcgcaaatgcacaggacaggagagaattggaaaagattccaactatgagcaggagggtaaagtccagttcgtgattgacgcagtctatgctatggctcacgcccttcaccacatgaacaaggatctctgtgctgactaccggggtgtctgcccagagatggagcaagctggaggcaagaagttgctgaagtatatacgcaatgttaatttcaatggtagtgctggcactccagtgatgtttaacaagaacggggatgcacctgggcgttatgacatctttcagtaccagaccacaaacaccagcaacccgggttaccgtctgatcgggcagtggacagacgaacttcagctcaatatagaagacatgcagtggggtaaaggagtccgagagatacccgcctcagtgtgcacactaccatgtaagccaggacagagaaagaagacacagaaaggaactccttgctgttggacctgtgagccttgcgatggttaccagtaccagtttgatgagatgacatgccagcattgcccctatgaccagaggcccaatgaaaatcgaaccggatgccaggatattcccatcatcaaactggagtggcactccccctgggctgtgattcctgtcttcctggcaatgttggggatcattgccaccatctttgtcatggccactttcatccgctacaatgacacgcccattgtccgggcatctgggcgggaactcagctatgttcttttgacgggcatctttctttgctacatcatcactttcctgatgattgccaaaccagatgtggcagtgtgttctttccggcgagttttcttgggcttgggtatgtgcatcagttatgcagccctcttgacgaaaacaaatcggatttatcgcatatttgagcagggcaagaaatcagtaacagctcccagactcataagcccaacatcacaactggcaatcacttccagtttaatatcagttcagcttctaggggtgttcatttggtttggtgttgatccacccaacatcatcatagactatgatgaacacaagacaatgaaccctgagcaagccagaggggttctcaagtgtgacattacagatctccaaatcatttgctccttgggatatagcattcttctcatggtcacatgtactgtgtatgccatcaagactcggggtgtacccgagaattttaacgaagccaagcccattggattcactatgtacacgacatgtatagtatggcttgccttcattccaattttttttggcaccgctcaatcagcggaaaagctctacatacaaactaccacgcttacaatctccatgaacctaagtgcatcagtggcgctggggatgctatacatgccgaaagtgtacatcatcattttccaccctgaactcaatgtccagaaacggaagcgaagcttcaaggcggtagtcacagcagccaccatgtcatcgaggctgtcacacaaacccagtgacagacccaacggtgaggcaaagaccgagctctgtgaaaacgtagacccaaacagccctgctgcaaaaaagaagtatgtcagttataataacctggttatctaacctgttccattccatggaaccatggaggaggaagaccctcagttattttgtcacccaacctggcataggactctttggtcctacccgcttcccatcaccggaggagcttccccggccgggagaccagtgttagaggatccaagcgacctaaacagctgctttatgaaatatccttactttatctgggcttaataagtcactgacatcagcactgccaactcggctgcaattgtggaccttccctaccaaagggagtgttgaaactcaagtcccgccctggctctttagaatggaccactgagagccacaggaccgttttggggctgacctgtcttattacgtatgtacttctaggttgcaaggttttgaaattttctgtacagtttgtgaggacctttgcactttgccatctgatgtcgtacctcggttcactgtttgttttcgaatgccttgttttcatagagccctattctctcagacggtggaatatttggaaaaattttaaaacaattaaaattttaaagcaatcttggcagactaaaacaagtacatctgtacatgactgtataattacgattatagtaccactgcacatcatgtttttttttttaagacaaaaaagatgtttaaagaccaaaaactgtgctgagaaagtatgccccacctatctttggtatatgataggttacataaaaggaaggtattggctgaactgaatagaggtcttgatctttggaatgcatgccagtaatgtattttacagtacatgtttattatgttcaatatttgtatttgtgttctcttttgttatttttaattagggtatatgaatattttgcaataattttaataattattaagctgtttgaaggaaagaatatggatttttcatgtcttgaggttttgttcatgccccctttgactgatcagtgtgataaggactttaggaaaaaaagcatgtatgttttttactgtttgtaataagtactttcgttaatcttgctgcttatgtgccaatttagtggaaaaaaacaacccttgctgaaaaattccctctttccattctctttcaattctgtgatattgtccaagaatgtatcaataaaatactttggttaacttttt

SEQ ID NO: 26 - DNA, 4239 bp, Homo sapiens
agtgctgggctgttggagagagcgagcagcaagccggtgagcgcgagcgcggcgcgccggccggctaacccgagagcgcgaggcgccccaggctggcaggcgccgcgggacccctcaccctctctggtcgcccctccccggattcccccaccctccgtgcctgcaggagcccctgggctttcccggaggagctcgccctgaagggcccggacctcggcgagcccaccaccgttccctccagcgccgccgccgccaccgcagcagccggagcagcatggtccagctgaggaagctgctccgcgtcctgactttgatgaagttcccctgctgcgtgctggaggtgctcctgtgcgcgctggcggcggcggcgcgcggccaggagatgtacgccccgcactcaatccggatcgagggggacgtcaccctcggggggctgttccccgtgcacgccaagggtcccagcggagtgccctgcggcgacatcaagagggaaaacgggatccacaggctggaagcgatgctctacgccctggaccagatcaacagtgatcccaacctactgcccaacgtgacgctgggcgcgcggatcctggacacttgttccagggacacttacgcgctcgaacagtcgcttactttcgtccaggcgctcatccagaaggacacctccgacgtgcgctgcaccaacggcgaaccgccggttttcgtcaagccggagaaagtagttggagtgattggggcttcggggagttcggtctccatcatggtagccaacatcctgaggctcttccagatcccccagattagttatgcatcaacggcacccgagctaagtgatgaccggcgctatgacttcttctctcgcgtggtgccacccgattccttccaagcccaggccatggtagacattgtaaaggccctaggctggaattatgtgtctaccctcgcatcggaaggaagttatggagagaaaggtgtggagtccttcacgcagatttccaaagaggcaggtggactctgcattgcccagtccgtgagaatcccccaggaacgcaaagacaggaccattgactttgatagaattatcaaacagctcctggacacccccaactccagggccgtcgtgatttttgccaacgatgaggatataaagcagatccttgcagcagccaaaagagctgaccaagttggccattttctttgggtgggatcagacagctggggatccaaaataaacccactgcaccagcatgaagatatcgcagaaggggccatcaccattcagcccaagcgagccacggtggaagggtttgatgcctactttacgtcccgtacacttgaaaacaacagaagaaatgtatggtttgccgaatactgggaggaaaacttcaactgcaagttgacgattagtgggtcaaaaaaagaagacacagatcgcaaatgcacaggacaggagagaattggaaaagattccaactatgagcaggagggtaaagtccagttcgtgattgacgcagtctatgctatggctcacgcccttcaccacatgaacaaggatctctgtgctgactaccggggtgtctgcccagagatggagcaagctggaggcaagaagttgctgaagtatatacgcaatgttaatttcaatggtagtgctggcactccagtgatgtttaacaagaacggggatgcacctgggcgttatgacatctttcagtaccagaccacaaacaccagcaacccgggttaccgtctgatcgggcagtggacagacgaacttcagctcaatatagaagacatgcagtggggtaaaggagtccgagagatacccgcctcagtgtgcacactaccatgtaagccaggacagagaaagaagacacagaaaggaactccttgctgttggacctgtgagccttgcgatggttaccagtaccagtttgatgagatgacatgccagcattgcccctatgaccagaggcccaatgaaaatcgaaccggatgccaggatattcccatcatcaaactggagtggcactccccctgggctgtgattcctgtcttcctggcaatgttggggatcattgccaccatctttgtcatggccactttcatccgctacaatgacacgcccattgtccgggcatctgggcgggaactcagctatgttcttttgacgggcatctttctttgctacatcatcactttcctgatgattgccaaaccagatgtggcagtgtgttctttccggcgagttttcttgggcttgggtatgtgcatcagttatgcagccctcttgacgaaaacaaatcggatttatcgcatatttgagcagggcaagaaatcagtaacagctcccagactcataagcccaacatcacaactggcaatcacttccagtttaatatcagttcagcttctaggggtgttcatttggtttggtgttgatccacccaacatcatcatagactatgatgaacacaagacaatgaaccctgagcaagccagaggggttctcaagtgtgacattacagatctccaaatcatttgctccttgggatatagcattcttctcatggtcacatgtactgtgtatgccatcaagactcggggtgtacccgagaattttaacgaagccaagcccattggattcactatgtacacgacatgtatagtatggcttgccttcattccaattttttttggcaccgctcaatcagcggaaaagctctacatacaaactaccacgcttacaatctccatgaacctaagtgcatcagtggcgctggggatgctatacatgccgaaagtgtacatcatcattttccaccctgaactcaatgtccagaaacggaagcgaagcttcaaggcggtagtcacagcagccaccatgtcatcgaggctgtcacacaaacccagtgacagacccaacggtgaggcaaagaccgagctctgtgaaaacgtagacccaaacaactgtataccaccagtaagaaagagtgtacaaaagtctgttacttggtacactatcccaccaacagtatagcttttgactgctttcccaaaggccctgctgcaaaaaagaagtatgtcagttataataacctggttatctaacctgttccattccatggaaccatggaggaggaagaccctcagttattttgtcacccaacctggcataggactctttggtcctacccgcttcccatcaccggaggagcttccccggccgggagaccagtgttagaggatccaagcgacctaaacagctgctttatgaaatatccttactttatctgggcttaataagtcactgacatcagcactgccaactcggctgcaattgtggaccttccctaccaaagggagtgttgaaactcaagtcccgccctggctctttagaatggaccactgagagccacaggaccgttttggggctgacctgtcttattacgtatgtacttctaggttgcaaggttttgaaattttctgtacagtttgtgaggacctttgcactttgccatctgatgtcgtacctcggttcactgtttgttttcgaatgccttgttttcatagagccctattctctcagacggtggaatatttggaaaaattttaaaacaattaaaattttaaagcaatcttggcagactaaaacaagtacatctgtacatgactgtataattacgattatagtaccactgcacatcatgtttttttttttaagacaaaaaagatgtttaaagaccaaaaactgtgctgagaaagtatgccccacctatctttggtatatgataggttacataaaaggaaggtattggctgaactgaatagaggtcttgatctttggaatgcatgccagtaatgtattttacagtacatgtttattatgttcaatatttgtatttgtgttctcttttgttatttttaattagggtatatgaatattttgcaataattttaataattattaagctgtttgaaggaaagaatatggatttttcatgtcttgaggttttgttcatgccccctttgactgatcagtgtgataaggactttaggaaaaaaagcatgtatgttttttactgtttgtaataagtactttcgttaatcttgctgcttatgtgccaatttagtggaaaaaaacaacccttgctgaaaaattccctctttccattctctttcaattctgtgatattgtccaagaatgtatcaataaaatactttggttaacttttt

SEQ ID NO: 27 - DNA, 5011 bp, Homo sapiens
ggggctgctgtggccggacccgaaggcgggcgccgggagcgcagcgagccagacgcgcctctccaagaccgtgaccttggcatagggagcggggctgcgcgcagtcctgagatcagaccagagctcatcctcgtggagacccacggccgaggggccggagctgcctctgtgcgagggagccctggccgcggcgcagaaggcatcacaggaggcctctgcatgatgtggcttccaaagactcaaggaccacccacattacaagtctggattgaggaaggcagaaatggagattcaaacaccacgtcttctattattttattaatcaatctgtagacatgtgtccccactgcagggagtgaactgctccaagggagaaacttctgggagcctccaaactcctagctgtctcatcccttgccctggagagacggcagaaccatggcattttatagctgctgctgggtcctcttggcactcacctggcacacctctgcctacgggccagaccagcgagcccaaaagaagggggacattatccttggggggctctttcctattcattttggagtagcagctaaagatcaagatctcaaatcaaggccggagtctgtggaatgtatcaggtataatttccgtgggtttcgctggttacaggctatgatatttgccatagaggagataaacagcagcccagcccttcttcccaacttgacgctgggatacaggatatttgacacttgcaacaccgtttctaaggccttggaagccaccctgagttttgttgctcaaaacaaaattgattctttgaaccttgatgagttctgcaactgctcagagcacattccctctacgattgctgtggtgggagcaactggctcaggcgtctccacggcagtggcaaatctgctggggctcttctacattccccaggtcagttatgcctcctccagcagactcctcagcaacaagaatcaattcaagtctttcctccgaaccatccccaatgatgagcaccaggccactgccatggcagacatcatcgagtatttccgctggaactgggtgggcacaattgcagctgatgacgactatgggcggccggggattgagaaattccgagaggaagctgaggaaagggatatctgcatcgacttcagtgaactcatctcccagtactctgatgaggaagagatccagcatgtggtagaggtgattcaaaattccacggccaaagtcatcgtggttttctccagtggcccagatcttgagcccctcatcaaggagattgtccggcgcaatatcacgggcaagatctggctggccagcgaggcctgggccagctcctccctgatcgccatgcctcagtacttccacgtggttggcggcaccattggattcgctctgaaggctgggcagatcccaggcttccgggaattcctgaagaaggtccatcccaggaagtctgtccacaatggttttgccaaggagttttgggaagaaacatttaactgccacctccaagaaggtgcaaaaggacctttacctgtggacacctttctgagaggtcacgaagaaagtggcgacaggtttagcaacagctcgacagccttccgacccctctgtacaggggatgagaacatcagcagtgtcgagaccccttacatagattacacgcatttacggatatcctacaatgtgtacttagcagtctactccattgcccacgccttgcaagatatatatacctgcttacctgggagagggctcttcaccaatggctcctgtgcagacatcaagaaagttgaggcgtggcaggtcctgaagcacctacggcatctaaactttacaaacaatatgggggagcaggtgacctttgatgagtgtggtgacctggtggggaactattccatcatcaactggcacctctccccagaggatggctccatcgtgtttaaggaagtcgggtattacaacgtctatgccaagaagggagaaagactcttcatcaacgaggagaaaatcctgtggagtgggttctccagggagccactcacctttgtgctgtctgtcctccaggtgcccttctccaactgcagccgagactgcctggcagggaccaggaaagggatcattgagggggagcccacctgctgctttgagtgtgtggagtgtcctgatggggagtatagtgatgagacagatgccagtgcctgtaacaagtgcccagatgacttctggtccaatgagaaccacacctcctgcattgccaaggagatcgagtttctgtcgtggacggagccctttgggatcgcactcaccctctttgccgtgctgggcattttcctgacagcctttgtgctgggtgtgtttatcaagttccgcaacacacccattgtcaaggccaccaaccgagagctctcctacctcctcctcttctccctgctctgctgcttctccagctccctgttcttcatcggggagccccaggactggacgtgccgcctgcgccagccggcctttggcatcagcttcgtgctctgcatctcatgcatcctggtgaaaaccaaccgtgtcctcctggtgtttgaggccaagatccccaccagcttccaccgcaagtggtgggggctcaacctgcagttcctgctggttttcctctgcaccttcatgcagattgtcatctgtgtgatctggctctacaccgcgcccccctcaagctaccgcaaccaggagctggaggatgagatcatcttcatcacgtgccacgagggctccctcatggccctgggcttcctgatcggctacacctgcctgctggctgccatctgcttcttctttgccttcaagtcccggaagctgccggagaacttcaatgaagccaagttcatcaccttcagcatgctcatcttcttcatcgtctggatctccttcattccagcctatgccagcacctatggcaagtttgtctctgccgtagaggtgattgccatcctggcagccagctttggcttgctggcgtgcatcttcttcaacaagatctacatcattctcttcaagccatcccgcaacaccatcgaggaggtgcgttgcagcaccgcagctcacgctttcaaggtggctgcccgggccacgctgcgccgcagcaacgtctcccgcaagcggtccagcagccttggaggctccacgggatccaccccctcctcctccatcagcagcaagagcaacagcgaagacccattcccacagcccgagaggcagaagcagcagcagccgctggccctaacccagcaagagcagcagcagcagcccctgaccctcccacagcagcaacgatctcagcagcagcccagatgcaagcagaaggtcatctttggcagcggcacggtcaccttctcactgagctttgatgagcctcagaagaacgccatggcccacaggaattctacgcaccagaactccctggaggcccagaaaagcagcgatacgctgacccgacaccagccattactcccgctgcagtgcggggaaacggacttagatctgaccgtccaggaaacaggtctgcaaggacctgtgggtggagaccagcggccagaggtggaggaccctgaagagttgtccccagcacttgtagtgtccagttcacagagctttgtcatcagtggtggaggcagcactgttacagaaaacgtagtgaattcataaaatggaaggagaagactgggctagggagaatgcagagaggtttcttggggtcccagggaagaggaatcgccccagactcctttcctctgaggaagaagggataatagacacatcaaatgccccgaatttagtcacaccatcttaaatgacagtgaattgacccatgttccctttaaaattaaaaaaaagaagagccttgtgtttctgtggttgcatttgtcaaagcattgagatctccacggtcagatttgctgttcacccacatctaatgtctcttcctctgttctatcccacccaacagctcagagatgaaactatggctttaaactaccctccagagtgtgcagactgatgggacatcaaatttgccaccactagagctgagagtctgaaagacagaatgtcaccagtcctgcccaatgccttgacaacagactgaattttaaatgttcacaacataaggagaatgtatctcctcctatttatgaaaaccatatgatattttgtctcctacctgctgctgctattatgtaacatccagaaggtttgcacccctcctataccatatgtctgcttctgtccaggacatgatactgatgccatgtttagattccaggatcacaagaatcacctcaaattgttaggaagggactgcataaaccaatgagctgtatctgtaattaatattcctatatgtagctttatccttaggaaaatgcttctgttgtaatagtccatggacaatataaactgaaaaatgtcagtctggtttatataaggcagtattattgagctctatttccccaccccactatcctcactcccataagctaagccttatgtgagccccttcagggactcaagggtccagaagtccctcccatctctaccccaaagaattcctgaagccagatccaccctatccctgtacagagtaagttctcaattattggcctgctaatagctgctagggtaggaaagcgtggttccaagaaagatccaccctcaaatgtcagagctatgttccctccagcagtggtattaatactgccggtcacccaggctctggagccagagagacagaccggggttcaagccatggcttcgtcatttgcaagctgagtgactgtaggcagggaaccttaacctctctaagccacagcttcttcatctttaaaataaggataataatcattctttcccctcagagctcttatgtggattaaacgagataatgtatataaagtactttagcctggtacctagcacacaataagcattcaataaatattagttaatattatta

SEQ ID NO: 28 - DNA, 4924 bp, Homo sapiens
caacaggcacctggctgcagccaggaaggaccgcacgccctttcgcgcaggagagtggaaggagggagctgtttgccagcaccgaggtcttgcggcacaggcaacgcttgacctgagtcttgcagaatgaaaggcatcacaggaggcctctgcatgatgtggcttccaaagactcaaggaccacccacattacaagtctggattgaggaaggcagaaatggagattcaaacaccacgtcttctattattttattaatcaatctgtagacatgtgtccccactgcagggagtgaactgctccaagggagaaacttctgggagcctccaaactcctagctgtctcatcccttgccctggagagacggcagaaccatggcattttatagctgctgctgggtcctcttggcactcacctggcacacctctgcctacgggccagaccagcgagcccaaaagaagggggacattatccttggggggctctttcctattcattttggagtagcagctaaagatcaagatctcaaatcaaggccggagtctgtggaatgtatcaggtataatttccgtgggtttcgctggttacaggctatgatatttgccatagaggagataaacagcagcccagcccttcttcccaacttgacgctgggatacaggatatttgacacttgcaacaccgtttctaaggccttggaagccaccctgagttttgttgctcaaaacaaaattgattctttgaaccttgatgagttctgcaactgctcagagcacattccctctacgattgctgtggtgggagcaactggctcaggcgtctccacggcagtggcaaatctgctggggctcttctacattccccaggtcagttatgcctcctccagcagactcctcagcaacaagaatcaattcaagtctttcctccgaaccatccccaatgatgagcaccaggccactgccatggcagacatcatcgagtatttccgctggaactgggtgggcacaattgcagctgatgacgactatgggcggccggggattgagaaattccgagaggaagctgaggaaagggatatctgcatcgacttcagtgaactcatctcccagtactctgatgaggaagagatccagcatgtggtagaggtgattcaaaattccacggccaaagtcatcgtggttttctccagtggcccagatcttgagcccctcatcaaggagattgtccggcgcaatatcacgggcaagatctggctggccagcgaggcctgggccagctcctccctgatcgccatgcctcagtacttccacgtggttggcggcaccattggattcgctctgaaggctgggcagatcccaggcttccgggaattcctgaagaaggtccatcccaggaagtctgtccacaatggttttgccaaggagttttgggaagaaacatttaactgccacctccaagaaggtgcaaaaggacctttacctgtggacacctttctgagaggtcacgaagaaagtggcgacaggtttagcaacagctcgacagccttccgacccctctgtacaggggatgagaacatcagcagtgtcgagaccccttacatagattacacgcatttacggatatcctacaatgtgtacttagcagtctactccattgcccacgccttgcaagatatatatacctgcttacctgggagagggctcttcaccaatggctcctgtgcagacatcaagaaagttgaggcgtggcaggtcctgaagcacctacggcatctaaactttacaaacaatatgggggagcaggtgacctttgatgagtgtggtgacctggtggggaactattccatcatcaactggcacctctccccagaggatggctccatcgtgtttaaggaagtcgggtattacaacgtctatgccaagaagggagaaagactcttcatcaacgaggagaaaatcctgtggagtgggttctccagggaggtgcccttctccaactgcagccgagactgcctggcagggaccaggaaagggatcattgagggggagcccacctgctgctttgagtgtgtggagtgtcctgatggggagtatagtgatgagacagatgccagtgcctgtaacaagtgcccagatgacttctggtccaatgagaaccacacctcctgcattgccaaggagatcgagtttctgtcgtggacggagccctttgggatcgcactcaccctctttgccgtgctgggcattttcctgacagcctttgtgctgggtgtgtttatcaagttccgcaacacacccattgtcaaggccaccaaccgagagctctcctacctcctcctcttctccctgctctgctgcttctccagctccctgttcttcatcggggagccccaggactggacgtgccgcctgcgccagccggcctttggcatcagcttcgtgctctgcatctcatgcatcctggtgaaaaccaaccgtgtcctcctggtgtttgaggccaagatccccaccagcttccaccgcaagtggtgggggctcaacctgcagttcctgctggttttcctctgcaccttcatgcagattgtcatctgtgtgatctggctctacaccgcgcccccctcaagctaccgcaaccaggagctggaggatgagatcatcttcatcacgtgccacgagggctccctcatggccctgggcttcctgatcggctacacctgcctgctggctgccatctgcttcttctttgccttcaagtcccggaagctgccggagaacttcaatgaagccaagttcatcaccttcagcatgctcatcttcttcatcgtctggatctccttcattccagcctatgccagcacctatggcaagtttgtctctgccgtagaggtgattgccatcctggcagccagctttggcttgctggcgtgcatcttcttcaacaagatctacatcattctcttcaagccatcccgcaacaccatcgaggaggtgcgttgcagcaccgcagctcacgctttcaaggtggctgcccgggccacgctgcgccgcagcaacgtctcccgcaagcggtccagcagccttggaggctccacgggatccaccccctcctcctccatcagcagcaagagcaacagcgaagacccattcccacagcccgagaggcagaagcagcagcagccgctggccctaacccagcaagagcagcagcagcagcccctgaccctcccacagcagcaacgatctcagcagcagcccagatgcaagcagaaggtcatctttggcagcggcacggtcaccttctcactgagctttgatgagcctcagaagaacgccatggcccacaggaattctacgcaccagaactccctggaggcccagaaaagcagcgatacgctgacccgacaccagccattactcccgctgcagtgcggggaaacggacttagatctgaccgtccaggaaacaggtctgcaaggacctgtgggtggagaccagcggccagaggtggaggaccctgaagagttgtccccagcacttgtagtgtccagttcacagagctttgtcatcagtggtggaggcagcactgttacagaaaacgtagtgaattcataaaatggaaggagaagactgggctagggagaatgcagagaggtttcttggggtcccagggaagaggaatcgccccagactcctttcctctgaggaagaagggataatagacacatcaaatgccccgaatttagtcacaccatcttaaatgacagtgaattgacccatgttccctttaaaattaaaaaaaagaagagccttgtgtttctgtggttgcatttgtcaaagcattgagatctccacggtcagatttgctgttcacccacatctaatgtctcttcctctgttctatcccacccaacagctcagagatgaaactatggctttaaactaccctccagagtgtgcagactgatgggacatcaaatttgccaccactagagctgagagtctgaaagacagaatgtcaccagtcctgcccaatgccttgacaacagactgaattttaaatgttcacaacataaggagaatgtatctcctcctatttatgaaaaccatatgatattttgtctcctacctgctgctgctattatgtaacatccagaaggtttgcacccctcctataccatatgtctgcttctgtccaggacatgatactgatgccatgtttagattccaggatcacaagaatcacctcaaattgttaggaagggactgcataaaccaatgagctgtatctgtaattaatattcctatatgtagctttatccttaggaaaatgcttctgttgtaatagtccatggacaatataaactgaaaaatgtcagtctggtttatataaggcagtattattgagctctatttccccaccccactatcctcactcccataagctaagccttatgtgagccccttcagggactcaagggtccagaagtccctcccatctctaccccaaagaattcctgaagccagatccaccctatccctgtacagagtaagttctcaattattggcctgctaatagctgctagggtaggaaagcgtggttccaagaaagatccaccctcaaatgtcagagctatgttccctccagcagtggtattaatactgccggtcacccaggctctggagccagagagacagaccggggttcaagccatggcttcgtcatttgcaagctgagtgactgtaggcagggaaccttaacctctctaagccacagcttcttcatctttaaaataaggataataatcattctttcccctcagagctcttatgtggattaaacgagataatgtatataaagtactttagcctggtacctagcacacaataagcattcaataaatattagttaatattattaaaaaaaaaa

SEQ ID NO: 29 - DNA, 1642 bp, Homo sapiens
cctgaagctactggttggttccctgagaggtcccagaactctgcaaagtgagtccagcgctgagatttttcttgcagatccatcaggatgagcatccaggccccaccgagactactggagctggcggggcagagcctgctgagagaccaggccttgtccatctctgccatggaggagctgcccagggtgctctatctcccactcttcagggaggccttcagcaggagacacttccagactctgacggtgatggtgcaggcctggcctttcacctgcctccctctggtatcgctgatgaagacgcttcatctggagccattgaaagcattgctggaagggcttcatatgctgcttacacagaaggatcgccccaggaggtggaaacttcaagtgctggatttgcgggatgttgatgagaatttctgggccagatggcctggagcctgggccctgtcctgcttcccagaggccatgagtaagaggcagacagcagaggactgtccaaggacgggagagcaccagcccttaaaggtgttcatagacatctgcctcaaggaaataccccaggatgaatgcctgagatacctcttccagtgggtttaccaaaggagaggtttagtacacctgtgctgtagtaagctggtcaattatctaacgccaattaaatatctcagaaagtcattgaaaataatatacattaatagtattggggagctggaaattcacaacacgtgctggccacatctgataagaaagctttattgttacctgaaggagatgaagactctttgcaaactcgttttctccaggtgccatcattacacgtcagataatgaactcgagggatggttagtcaccagattcacctctgtgttcctcaggctggaacacctccagttgcttaaaataaaattgatcaccttcttcagtgggcacctggaacagctgatcaggtgcctccagaaccccttggagaacttggaattaacttgtggcaacctattagaagaggacttgaagtgtctctcccagttcccaagcctcggttacctaaagcatctgaatctcagctacgtgctgctgttccgcatcagtcttgaacccctaggagctctgctagagaaaattgctgcctctctcgagaccctcgtgttagagggctgtcagatccactactcccaactcagtgccatcctgcctggcctgagctgctgctcccagctcaccaccttctactttggcagcaattgcatgtctattgacgccctgaaggacctgctgcgccacaccagtgggctgagcaagttaagcctggagacgtatcctgcccctgaggagagtttgaattccttggttcgtgtcaattgggagatcttcaccccacttcgggctgagctgatgtgtacactgagggaattcaggcagcccaagaggatcttcattggccccaccccctgcccttcctgtggctcatcaccgtctgaggaactggagctccatctttgctgctagggaaggcgtgcccagtggggtagagaaatccaaagttctcttccaggcacttggacactaaaatctactatgtaggtgcaaactatttttctcttttcttatttatttcattttttaataattccaaaat

SEQ ID NO: 30 - DNA, 3185 bp, Homo sapiens
ggcagtgagactgtaagcagtctgggttgggcagaaggcagaaaaccagcagagtcacagaggagatggccaactgccaaatagccatcttgtaccagagattccagagagtggtctttggaatttcccaactcctttgcttcagtgccctgatctctgaactaacaaaccagaaagaagtggcagcatggacttatcattacagcacaaaagcatactcatggaatatttcccgtaaatactgccagaatcgctacacagacttagtggccatccagaataaaaatgaaattgattacctcaataaggtcctaccctactacagctcctactactggattgggatccgaaagaacaataagacatggacatgggtgggaaccaaaaaggctctcaccaacgaggctgagaactgggctgataatgaacctaacaacaaaaggaacaacgaggactgcgtggagatatacatcaagagtccgtcagcccctggcaagtggaatgatgagcactgcttgaagaaaaagcacgcattgtgttacacagcctcctgccaggacatgtcctgcagcaaacaaggagagtgcctcgagaccatcgggaactacacctgctcctgttaccctggattctatgggccagaatgtgaatacgtgagagagtgtggagaacttgagctccctcaacacgtgctcatgaactgcagccaccctctgggaaacttctcttttaactcgcagtgcagcttccactgcactgacgggtaccaagtaaatgggcccagcaagctggaatgcttggcttctggaatctggacaaataagcctccacagtgtttagctgcccagtgcccacccctgaagattcctgaacgaggaaacatgacctgccttcattctgcaaaagcattccagcatcagtctagctgcagcttcagttgtgaagagggatttgcattagttggaccggaagtggtgcaatgcacagcctcgggggtatggacagccccagccccagtgtgtaaagctgtgcagtgtcagcacctggaagcccccagtgaaggaaccatggactgtgttcatccgctcactgcttttgcctatggctccagctgtaaatttgagtgccagcccggctacagagtgaggggcttggacatgctccgctgcattgactctggacactggtctgcacccttgccaacctgtgaggctatttcgtgtgagccgctggagagtcctgtccacggaagcatggattgctctccatccttgagagcgtttcagtatgacaccaactgtagcttccgctgtgctgaaggtttcatgctgagaggagccgatatagttcggtgtgataacttgggacagtggacagcaccagccccagtctgtcaagctttgcagtgccaggatctcccagttccaaatgaggcccgggtgaactgctcccaccccttcggtgcctttaggtaccagtcagtctgcagcttcacctgcaatgaaggcttgctcctggtgggagcaagtgtgctacagtgcttggctactggaaactggaattctgttcctccagaatgccaagccattccctgcacacctttgctaagccctcagaatggaacaatgacctgtgttcaacctcttggaagttccagttataaatccacatgtcaattcatctgtgacgagggatattctttgtctggaccagaaagattggattgtactcgatcgggacgctggacagactccccaccaatgtgtgaagccatcaagtgcccagaactctttgccccagagcagggcagcctggattgttctgacactcgtggagaattcaatgttggctccacctgccatttctcttgtgacaacggctttaagctggaggggcccaataatgtggaatgcacaacttctggaagatggtcagctactccaccaacctgcaaaggcatagcatcacttcctactccaggggtgcaatgtccagccctcaccactcctgggcagggaaccatgtactgtaggcatcatccgggaacctttggttttaataccacttgttactttggctgcaacgctggattcacactcataggagacagcactctcagctgcagaccttcaggacaatggacagcagtaactccagcatgcagagctgtgaaatgctcagaactacatgttaataagccaatagcgatgaactgctccaacctctggggaaacttcagttatggatcaatctgctctttccattgtctagagggccagttacttaatggctctgcacaaacagcatgccaagagaatggccactggtcaactaccgtgccaacctgccaagcaggaccattgactatccaggaagccctgacttactttggtggagcggtggcttctacgataggtctgataatgggtgggacgctcctggctttgctaagaaagcgtttcagacaaaaagatgatgggaaatgccccttgaatcctcacagccacctaggaacatatggagtttttacaaacgctgcatttgacccgagtccttaaggtttccataaacacccatgaatcaaagacatggaattaccttagattagctctggaccagcctgttggacccgctctggaccaaccctgtttcctgagtttgggattgtggtacaatctcaaattctcaacctaccaccccttcctgtcccacctcttctcttcctgtaacacaagccacagaagccaggagcaaatgtttctgcagtagtctctgtgctttgactcacctgttacttgaaataccagtgaaccaaagagactggagcatctgactcacaagaagaccagactgtggagaaataaaaatacctctttattttttgattgaaggaaggttttctccactttgttggaaagcaggtggcatctctaattggaagaaattcctgtagcatcttctggagtctccagtggttgctgttgatgaggcctcttggacctctgctctgaggcttccagagagtcctctggatggcaccagaggctgcagaaggccaagaatcaagctagaaggccacatgtcaccgtggaccttcctgccaccagtcactgtccctcaaatgacccaaagaccaatattcaaatgcgtaattaaaagaattttccccaaaaaaaaaaaaaaaa

SEQ ID NO: 31 - DNA, 3153 bp, Homo sapiens
atagaccaggcttctcaggagaaaccccgggagattccacactgtcagccccttctccaagatcagtacgtgggcctgactcctcctcggtgcccagctcagtattggcaactaggagagtagtgagattgaacttggccttgaggaacagctgcctctagagttggatcagacaagggtgctgagagccgggactcacaaccaaaggagaaatgagcaatccgcggtctttggaagaggagaaatatgatatgtcaggtgcccgcctggccctaatactgtgtgtcaccaaagcccgggaaggttccgaagaagacctggatgctctggaacacatgtttcggcagctgagattcgaaagcaccatgaaaagagaccccactgccgagcaattccaggaagagctggaaaaattccagcaggccatcgattcccgggaagatcccgtcagttgtgccttcgtggtactcatggctcacgggagggaaggcttcctcaagggagaagatggggagatggtcaagctggagaatctcttcgaggccctgaacaacaagaactgccaggccctgcgagctaagcccaaggtgtacatcatacaggcctgtcgaggagaacaaagggaccccggtgaaacagtaggtggagatgagattgtgatggtcatcaaagacagcccacaaaccatcccaacatacacagatgccttgcacgtttattccacggtagagggatacatcgcctaccgacatgatcagaaaggctcatgctttatccagaccctggtggatgtgttcacgaagaggaaaggacatatcttggaacttctgacagaggtgacccggcggatggcagaagcagagctggttcaagaaggaaaagcaaggaaaacgaaccctgaaatccaaagcaccctccggaaacggctgtatctgcagtagaagtagaaagaccaggaggagctttccttccagcattctttctgtctcacagaaatttagaggcagctcttacctctccccaagatcttctgttcccaaggccaaatggcacccagtttcttttccatcacacccttcatgcaggtcctcctgtccttattagagcaagccagccaaaacttagcacaaggcatggtggcaacattaacatcacctccctcaggctggactttctatctttattaatgcaaccgaagagacctaagagtgcattcacttatcccactttctgttcctgtggtcttctttctcccatgaagcagaaactggataaagctcaagattttccatagacaaaccaaagcccactcatcccctcctaccccaatccaacctctgctggctcctgcatctcacttggaggtcaaacctcctcctgaggccaatgcattcccaacttccagttctttcctttaccctggagagttagtaaggtaagaaccattctttctctccaaaaccactcctccttggctggcaagttggtgtcctaactccgttctcttcctagctcatggcctctctagataataaagttgtctcctcctttctggatctcttcctcctaacacccctcccctgaaaccctggactctgccctctctccaagaaaatccatctattcaactattcttgcattcaattactctaaatgagagcgtgttggagctatggcaaattccctgttgtcaccttgctattttgcagacaacataatatttaacctctcataaccagagaggttaaataatttgtcaaatgcaatacagtaagacagaggcaaggacaaggtttgacttccagcccagcctcttttccacaacctgctaaatcctgatccatctgaaaacttttctaattagtgaagatgactaataaaaattttccctatctccaaggtaggagctttctggaagtttctagaaattttcaataaccaccagccaaggttacctccaggtaaccttgcagcaccaggctggaagtcagatcggcttcactatcttccaactctacagcctgtatctctccatccccagctttgacctttcctgctcaagtaacctacgggcacatccagcgtcactaaaaactcagggcttttcttcccggttactcctccaagcgttccctggtatcctcaacctcagatcccaggttcagatttctgcagtcaatctatgacccctctcttcttgcatccttcatatgccaccagacaccatgcccagtccagcctgattttgaaacaactttcatgccggtcttctcttccctgacatgttactgtccaggctcaagtcctcagcttctcatatctgcatctttgcaaccaacttcctcccttgcctctctgcttttccatcccacttttcatgtgtcctccataccatctataacagtgatctccctggaacactcaagaagacacaacataccatattatttaaagaccagggtactggacagtggctcacacctgtattcccgactttgagagtctgaagcgggaggatcacttgaggccaggagttaagagaccagcctgggcaacacagcaagaccctgtctctaaaaaaaaaaattaattaactgggtatggtggcacatgcctgtagtcccagctactcaggaggctgaggtgggaggatgacttgagcccaggagtttgaggctgcaaggagctatgatcatgccagtgcatcccagctctaggtgagacagtgagatccggtctccaaaataaatcaatcaatcaaataaagaccaaagtcaaaccgcacatcaggatctctcacacccttccaattttgccatctaccagcacttagctaaacccatctcccatctcttccaccatgaattcactctttcaaaaaggctaatgtcttcttactcacccttgcctctaagcctttgctatcaccatttcccccaagctggagggccctccctctccctttacccctcttccactacctcccacccctactttttccagaaagccatttcctctcttttttctgattgatccttccctctcacccaggattagatgctggaaatgaccacttctggagggcagggaacaagcccttaatctgcataatgagtgttcaataaacagttgtcaaactttgaaaaaaaaaaa

SEQ ID NO: 32 - DNA, 520 bp, Homo sapiens
atgtcctacaactgttgctctagaaacttctcctcctgctcccacgggggttacttgcactacccaggctcctcctgtggctcttcctaccccagcaacctggtctacagcactgacctctgctctcccagcacctgccagctgggttcctctctctataggggctgtcaggagacctgctggaggcccaacagctgtcagacattgtgtgttgagtccagcccctgccacacctcctgctactaccccaggactcacatgctctgcaattcttgcctgactatgcatgttgggtctcggggttttggatccaatagctgctgctccctgagctgtggatccaggagctgctcctcactgggctgtggatccaatggcttcagatatctgaattatagaatccatacctccccttcccagagttatagatccagattctgccatccaatctattttccacctagaaggtggttccattcatcttgttatcagccattctgtagatctggtttctactgac

SEQ ID NO: 33 - DNA, 200002 bp, Homo sapiens
cattgatcaactcccacttataagtgagaagatgcagtgtttggttttctgttcctgtgttagtttgctgaggataatggcttccagctccatccatgtccatgcaaaggacatgattccattcctttatatcactgcatactattccatggtgtacatgtgccacattttctttatccagtctgtcatcgatggaagacatgctattgtttttattatcaagtatggtagagtgggagaagggaggtagagccttacaaacaagagagtgacaggaaggacacagaagcagaagaaacagccttgcacagggtgcagttcaggctagagaatggcgagagatgaatgtggagaagcaggcagggactagagcacagtggctgtgaatgccctccttaggcacttgacggtcatcatgacttggggatattctcattctctgcaggggaaggatgtgctcagacttggctggctgagctgtcactctggatgtttgcagtcgagaagactgcagtcacaaagtgatggatcagtttagctagaaatgatgaagtctgaactagaagaacaatgctagagaacagagtggaagcaagcaatttaaggaatatctagtggggaaatattatcaagtcaaagtggataattcgttgtattttgtggaaagatgggggaagccatgggtcacatggagtccagctttacaggcgatttttgccgttatccccaaaggagagaacagggatagcagggagaaaagaagatgagcatgcaacagcgcagtgccattactcacagcccctttccccagttttttatatccagaacttctccttaaacagctaagcctttcaacttgctaaaatatcagctcagttgagcagtctgaagaataaggaagcatgagtctccactgacgaattatgccttctctccgtcgatgtaaatgctcccttaaatcacccttgaatttctcctctattcccgaggaactggttgggagttgaagcaggctataataatttaatctctacataaattcatagaatagaagtgacaggacaaagttgcacaccacatattctgaatgttcacatctcatttctggatgccactgaatctttatccgtgaaaagaacagcacattcttaaaaatcccgtaattttctttttcttatttgatttgctgtggcattctaaagagattcaccacattttccatctctgcttttacgcatttgtattccatatagatgctttcaaggtttcagttgctgaatctgcattgttgagatgaaatcatgagccttttgatttactgtaagagcttcattattctcagctgtgtcatttggtgccagtatctctgctgcctaaaaatgccatcaggattcatcgaaaaataaacaaaactctcttaaaatttactttctgtctgtaaacaataggaagagtagccggaagggtacaaggaaatctaaagaggatgcaaaatatatgcagggattttgatacacgttattcttctgaaaacttcgtttcatgctgccatgttaaaaatttctaaacaattcggagaacaaccccctttttccttcccatagaaaaagagtttagattaaggatattagcattattttctcttctaatttgtgttcactttgtatttcacaaagatgaaatggatgcttattcttacagtattcctgtgttattctttatgtactctctacagatagatccaatttggtatctcatagaaggtgaggcaggcatcatgtacatacaactgtaccagagaaatcatgcttcaaaatagaaaaatattaccatcctcataacatgattttatctactaaagtgcttccgtgtaaaaaaaaaaaaaagaaaagaaaaaaaaagatatcctaggaggttgcctaagacttacgttttccaaaaggggggacatgtagcactgctgataaatgaatatggttttgagtataacactaaggtggaattaattacctagaaacacataataagaaaagttttcttgtttcaattctttcagtacttctaattacttaaaagacaagggagaggatcaggaaaaataacaaatgggtactaggcttaatacctgggtcatgaaataatctgtacaagaaaccctatgacacaagtttgcctgtgtaacaaacttgcacgtgtatccctgaacttaaaataaaagtcaaaaaaaaaaaaagcagttgtgtgctgggttgccccttagatgcttacaagaggaggctgtttgcatctcctcccaaccatatccagtgatgttacctcgatagcctgaaattatccatggtggaaagatctacagacagaaatcagaaatttctgcaagtcagactctttgtctcacatagctgttaaacgtggaacagcacatcattgttgggaggggatagtgtcggtctggtcctaccattcaggtcttcagcacttctgtaatacatgctcacctcttttttaataacaaacctgcagtttccagccttttgtgtgaggtagcctctcctagtaccattttcctttcaatgacatcactttggaagttatctttaatttatgccagctgtataggttttgcttttatagtaatgataccgtgtctttctttttttttaagtatatcttttttttttattattatacttcaagttttagggtacatgtgcacaatgtgcaggttagttacatatgtatacatgtgccatgctggtgtgctgcacccactaactcgtcatctagcattaggtatatctcccaatgctatccctcccccctccccccaccccacaacagtccccagagtgtgatgtctccccttcctgtgtccatgtgttctcattgttcaattctcacctatgagtgagcatatgtggtgtttggttttttgttcttgcgatagtttatggagaatggtgatttccaatttcatccatgtccctacaaaggaggtgaactcatcatttctcatggctgcatagtattccatggtttatatgtgccacattttcttaatccagtctatcattgttggacatttcggttggttccaagtctttcctattgtgaataatgccacaataaacatacgtgtgcatgtgtctttatagcagcatgatttatagtcccttgggtatatacccagtaatgggatggctgggtcaaatggtatttccagttctagatccctgaggaatcgccacactgacttccacaatggttgaactagtttacagtcccaccaacagtgtaaaagtgttcctatttctccacatcctctccagcacctgttgtttcctgactttttaatgattgccattctaactggtgtgagatggtatctcattgtggttttgatttgcatttctctgatggccagtgatggtgagcattttttcatgtgtttattggctgcataaatgtcttcttttgagaagtgtctgttcatgtccttcacccactttttgatggggttgtttttttcttgtaaatttgttggagttcattgtagattctcgatactagccctttctcagatgagtaggttgcgaaaattttctcccattttgtaggttgcctgttcactctgatggtagtttcttttgctgtgcagaagctctttaatttaattagatcccatttgtcaattttggcttttgttgccattgcttttggtgttttagacatgaagtccttgcccacgcctatgtcctgaatggtaatgcctaggttttcttctagggtttttatggttttaggtctaacgtttaagtctttaatccatcttgaattaatttttgtataaggtgtaaggaagggatccagtttcagctttctatatatggctagccagttttcccagcaccatttattaaatagggaatcctttccccattgcttgtttttctcaggtttgtcaaagatcagatagatgtagatatgcggcgttatttctgagggctctgttctgttccattgatctatatctctgttttggtaccagtaccatgctgttttggttactgtagccttgtagtatagtttgaagtcagatagtgtgatgcctccagctttgtttttttggcttaggattgacttggtgatgcgggctcttttttggttccatatgaactttaaagtactatgttccaattctgtgaagaaagtgattggtagcttgatggggatggcattgaatctgtaaattaccttgggcagtatggccattttcatgatatcgattctttctacccatgagcatggaatgttcttccatttgtttgtatcctcttttatttctttgagcagtggtttgtagttctccttgaagaggtccttcacatcccttgtaagttggattcctaggtattttattctctttgaagcaattgtgaatgggttcattcatgatttggctctctgtttgtctgttgttggtgtataagaatgcttgtgatttttgtacattgattttgtatcctgagactttgctgaagttgcttatcagcttaaggagattttgggctgagacaatggggttttctagatatatggtcatgtcatctgcaaacagggacaatttgacttcctcttttcctaatcgaataccctttatttctttctcctgcctgattgacctggccagaacttccaacactatgttgaataggagtggtgagagagggcatccctgtcttgtgccagttttcaaagggaatgcttccagtttttgcccattcagtatgatattggctgtgggtttgtcatagatagctcttattattttgagatactttccatcaatacctaatttattgagagttttttagcatgaagggttgttgaattttgtcaaaagccttttctgcatctattgagataatcatgtggtttttgtctttggttctgtttatatgctggattacatttattgatttgtgtacattgaaccagccttgcatcccagggatgaagcccacttgatcatggtggataagctttttgatgtgctgctggattcagtttgccagtatttaatagaggatttttgcatcaatgttcatcaaggatattggtctaaaattctctgttttggttgtgtctctgcccggctttggtatcaggatgatgctggcctcataaaatgagttagggaggattccctctttttctattgattggaatagtttcagaaggaatggtaccagttcctccttgtacctctggtagaattcggctgtgaatccttctggtcctggactctttttggttggtaagctattgattactgccacaatttcagatcctgttattggtctattcagagattcaacttcttcctggtttagtcttgggagagtgtatgtgtcgaggaatttatccatttcttctagattttctagtttatttgtgtagaggtgtttgtagtattctctgatggtagtttgtatttctgtgggatttgtggtgatatcccctttgtcatttttattgcatctatttgattcttctctcttttcttctttattagtcttgctagcagtctatcaattttgttgatcctttcaaaaaaccagctcctggattcattgattttttgaagggttttttgtgtctctatttccttcagttctgctctgattttagttatttcttgccttctgctagcttttgaatgtgtttgctcttgcttttctagttcttttagttgtgatgttagggtgtcaattttggatctttcctgctttctcttgtgggcatttagtgctataaatttccctctacacactgctttgaatgagtcccagagattctggtatgctgtgtctttgttcttattggtttcaaagaacatctttatttctgccttcatttcgttatgtacccagtagtcattcaggagcaggttgttcagtttccatgtagttgagcagttttgagtgagatacttgatcctgagttctagtttgattgcactgtggtctaagagatagtttgttataatttctgttcttttacatttgctgaggagagctttacttccaactatgtggccaattttggaatcggtgtggtgtggtgctgaaaaaaaatgtatattctgttgatttgtggtggagagttctgtagatgtctattaggtccacttggtgcatagttgagttcaattcctgggtatccgtgttgactttctgtctcgttgatctgtctaatgttaacagtggggtgttaaagtctcccattattaatgtgtgggagtctaagtctctttgtaggtcactcaggacttgctttatgaatctgggtgctcctgtattgggtgcatatatatttaggatagttagctcttcttgttgaatggatccctttaccattatgcaatggccttctttgtctcttttgacctttcttggtttaaagtctgttttatcagagactaggattgcaacccctgcctttttttgttttccattggcttggtagatcttcctccatccttttattttgagcctatgtgtgtctctgcacgtgagatgggtttcctgaatacagcacactgatgggtcttgactctttatccaatttgccagtctgtgtcttttaattggagcatttagtccatttacatttaaagttaatattgttatgtgtgaatttgttcctgtcattatgatgttagctggttattttgctcattagttgatgcagtttcttcctagtctcgatggtctttacattttggcatgattttgcagcagctggtaccggttgtgcctttccatgtttagcacttccttcaggagctcttttagggcaggcctggtggtaacaaaatctctcagcatttgcttgtctgtaaagtactttatttctccttcacttatgaagcttactttggctgaatatgaaattctgggttgaaaattcttttctttaacaatgttgaatattggcccccactctcttctggcttgtagaatttctgccgagagatccgctgttagtctgatgagcttccctttgagggtaacctgacctttctctctggctgcccttaacattttttccttcatttcaactttggtgaatctgacaattatgtgtcttggagttgctcttctcgaggagtatctttgtggcattctctgtatttcctgaatctgaatgttggcctgccttgctatattggggaagttctcctggatgatatcctgcagagtgttttccaacttggttccattctccccttcacttccaggtacaccaatcagacgtagatttggtcttttcacatagtcccatatttcttggaggctttgcttatttctttttattcttttttctctaaacttcccttctcacttcatttcattcatttcatcttccatcactgataccctttcttccagttgatcacattggctcctgaggcttctgcattcttcatgtagttctcgagccttggttttcagctccatcagctcctttaagcacttctctgtattggttattctagttatacattcttctaaatttttttcaaagttttcaacttctttgcctttggtttgaatgtcctcccgtagctcggagtaatttgatcatctgaagccttcttctctcacctcgtcaaagtcattctccatccagctttgttccgttgctggtgaggaactgcgttcctttggaggaggagaggcactctgctttttagagtttccagtttttctgttctgttttttccccatctttgtggttttatctacttttggtctttgatgatggtgatgtacagatgggtttttggtgtggatgtcctttctgtttgttagttttccttctaacagacaggaccctcagctgcaggtctgttggagtaccctgccgtgtgaggtgtcagtgtgcccctgttggcaggtgcctcccagttaggctgctcgggggtcaggggtcagggacccacttgaggaggcagtctgcccgttctcagatctccagctgcgtgctgggagaaccactgctctcttcaaagctgtcagacagggacatttaagtctgcagaggttactgctgtctttttgtttgtctgtgccctgctcccagaggtggagcctacagaggcaggcaggcctccttgaactgtggtgggctccacccagttggagcttccaggctgctttgtttacctaatcaagcctgggcaatggcgggcgcccctcccccagcctcgctgccgccttgcagtttgatctcagactgctgtgctagcaatcagcgagactccgtggggtaggaccctccgagccaggtgcgggagatagtctcctggtgtgccgttttttaagcccgttggaaaagcgcagtattcgggtgggagtgacccgattttccacgtgcatccgtcacccctttctttgactcggaaagggaactccctgaccccttgcgcttcccgagtgagggaatgcctcgccctgcttccgctcgtgcacggtgcgcgcacccactgacctgcgcccactgtctggcgctccctagtgagatgaacccggtacctcagatggaaatgcagaaatcacccgtattcggccatcttggctcctcccccgtaagtatgcagtgtctttctttaaatatatttatttaaatcaattcagtaagaaagatgagctcaatttaaaaaaaagtgattatgtagacaatacattaaaaaggcaaaacaaagaaagtgttactggtaaacccaaagattaggacacattgttctgggcagttttccagtttttattgctatacagtttaatgggtcatagttctcagccacaatttctaccctcgttatctagcctcggggagtaagtttagggtatcaaagaaatatgcataccttttctctctctgtgtctttcattctttcttacctcaatgcaagtttctgtgaaaactaaaatgaggatttctctgtggttgagtctggccctctcttgaatggttctgtttcaaccttttcagtgattttatagttgtctgccttaaatgtaaaactcctcctggttcctttgttaggtccctggatgtcttcccagggctcctaatgtgagggctggggaaaggattgatggctgagaagggaagaaatgtgggagactttaatttcagagcttttatttgtggtttgttttcctatttgtttttgtgaaaaggcaagcacatagcatgaggctggagacgagactgtgcaagtatattattactctaatactgacttcgattgcctccttttgaccactttattgatatctaagatatataaacaagaccagctccttcccgtcactcaaaccaacagctgatttatattgcactatatagtctctcactcacaggagcatcagtcgtctgaaaaaaatgtgccacttaatcccttttctgactgtcattctcttcaaaggccctacttctgggaagatataaaggtgaaagtataagaagatatgggatatagtttgaaaatttgtcagcgttcaatatttagaagtcagaaattagttatccctcctttctggagactctgcttcggcattcggtctactagacaagctgagaatggagacataaaataatttgagagtagttgaaatagacgataagattaaaccattgtttgagtgatttctagacagcaataagttttgctcaaacatttcatcttgatttccatttgctctttctataaaaataaatctagatcgacaggagctgagtcaccactcagacatgacattttacattgtcttttaaatacaatcgctattatggtgacaattacgcacatgaaaaatgtgcctattgccttttgtccatgtttggcagccagctgtggtgtgtgtgcatgtaaatgagtgtcgatgtgtgcatgtgcatatgcgttacaataagataacctccatttgctattctattctaatacctctggtgagcctctgttttgaaaaagaaaaagttagattgagaaataagtagtttacaatagacatgttataaaattaatatagagaaattctaagtagtcataatgttcagatacccaatattttttctaatacgttataaaaaagagtatgtgcttggatgaggatttgatttgaaaaaaaaggaatggggacagagagaggaagagagagagagagaacaagaattaactctttgtatgtttctgggatctttaaatgttatgtctaattctatgtaattggaactgtcttgtatagtaaaatgtatgtgagaatattaagaagttattaattccttcttttataaaagggaataatgggacccagaaaaggaagtgactggctcaaggtcagccagttctttggaggcatcagactagaatccagtttccctccttccttgtcctgtggacattttgttactcttatatgtaaaacaaatatttaatgtgattgtaaacctcagatcgtatatgttacttagttgtgaacagaatgtattcactgtgaatactgatttactaaggtgaaaatttattatttttcactttacaaacctttacacaaatgaatgcaaaatcagaatatatattgaaagctgcttgtactgacttagacacagacattcaaatgaatttatacactagggtcaccagtcttgccttttttttttataagtaaatatttatgttgattttataaggctttcagacatgaagtttgagaaagttaatagttatcaggatttgcatgcaagatcacaaaacagtaaaataaaccaaagaacgagacttccttacaacctccaaaacataataatttgcagtttctagtgaaatctttattcttatgctatattcattttggtctcttaattattttccattttatactctttgactttctttggaatctcttgtatgatctcctctgtcttaatagtatagtcacctattttagcttgactgtatttttatcattcagagtaggatatacttactaagccagttatactccggtaaacttgtgaatgaaaaaacattagagaacagagaattaagagcaagtaatagagtcattatttcactgatcctcacccaatttcaggaaaatcatatccctaaaacagcaattctgactgataaatttttccatgtctaaacagaaagaaaagtgaaattatgggaatcctatgatagattactatacattgtgtgcttttaatagttcaacactggtaatgtttgataatcaagagtaaattaataggctaacatttagaaatgtatactttaataagtataaagtatataaacaattaggtaagcttgtggagaagttgaccaagatacataaattagaaaatacaagtgtccatctaaattttctatatttcatttttttcataatatttattaaaggcgtttaatgtatagtttctcatctgccattttgggagtcctttattgtaaagacaattctattgtttgatgacaaacagcaaccaccatggttattcaggacctccacattggataaattcaatttcttcttgagacacaagtttgcttctgtatttctgaggtaatgtttttattatttctgcagtgtctggtggaccctgatacattagcaaatctggtgatgtatcccttagaatgttgtgaaattacagaagagtgagatggtagccctgctgatctcaaagcttctgatacattgggtttaggattgtctcttctgtcaggaaaccttattaatggagtgtgtggtttgactacctgaacgaccctactggcagacgccatcttgctgccaatcgtcacccctgagaaggggcagtttccagtcttgccttttaatttatgaaatttgtgacaagtatggacttgaaggagcatttccaaactgtgggcgttttaggcccacatcttgcatctgtacatctttgagaagtacacagagaaggactgaagatgagtaggtctgaatgggatcccagcccacacactgcttcttcatgcagttagctctttcttaagttcaggaacttaagttggaacacctattctgaccagaccaacatgtttaggcaggtttgatgatcatttcctgggtttccatagtatctatcctgtgtctaaatatgacatattgtgttgaactagtctataaattccttgaggatgcctctgtatctactatacctccccacctctggacacaagcagaagctcaagcagtgttaatgaaatgaccatatctaagcaacttcccccaggataaaacttccccattccctgctatcattttgtcattaccaagtagtgacatatatacatcctagcttgattgtacaaattccattccttaattgaagggtagattttaagctgcctaagattcaaatctttgtttaaatttgtataatgaatatgtgcttgtgcctggctccatggagtaaaagtcaaaacctcaaaccagcaagagacccagattctagtctcacaaaaatgtgtttggtcatctgggatcagctgttgatactctcagagcttcagtgccttcatgggtcaataattggaacatctgttatttgcctcatagcactggtgcaaaatataataatatgagtattttattaatagcagttcacatgtatgaagattttcctattttccaggcactgtgttagttcttttataagtatcaatttattctatcctcaccacaaaccatatcctcgagttcaatagggccatgattcatatccaggctaaatctgattttgaatccaggtctcacactcctaaacgattgtctcatactgtttgccctcaaatgagataaaatatgcaagtattttgagacataccaaagtgactcagaactataaggcaatgatggtgtagaaatggatgcatagactgaatctttaattaagcaagaaaaaattgacatagagaaatgcgaagaaattcacgaaagacattgtccccatggaaggaggggaaaaagtggtccagtgatatatttgaaggagatagagtggggaggtgtgattggctaagagagttggaatcacatctgtcattacttcccttgctttatttacagcaggtggtaatctcaactccccgttcttccactctccctacacccaccttctaccaccttctctaacctggtcagaaatcttctagtcctttaatgttcagccaaatcaccacctccttgtgatttctttttaggtttttgccttactcccttagaaatgaaccatttcttcttttctgctctcacaacctcttttacttctatttcagggtttcttaaatttggtattcttgacattttggtccagataattcttttgtgtttgggagctgtcttgtacattgtaggatgtttggcagcatctctggcctcttctttttgaatgcatgatttacgcccccagtcatgacaatcaaaaatgtctccagacattgccaaaagtcccctccagggcaaaatcacctcagttgaaagcttttggttttttagccattgtaactacatgacccagtttttaaggggagccccatacctgagcaaattgttccagtgttcactttgaaaaatattcttactattaatatatcacccagtgtttctcaaactttaatgagctttagagaaacctgggagcttattaacacatagatagctagccccccaagccgcttttccccaagtctctgattccactactctgggtgggggtgtaagagtgcctttctaatacatttttttttcttttttctttttttgtttgtttttgttttttttttctagcttcacaaactttgtttaataagtgtcataatctcacaaagtaaaatgctatcattgaatataacaaatgtttgcatcatataagtaacaaatatttatctggtataactactacatgtattcacttatctatttagatgtatcaatatcattatataaatgatataatgcagcactgctatctgtgtagattcatcagtgacttttttttttttttttttttgagacggagtctcgctctctctcccaggctggagtgcagccgcgcgatctcggctcactgcaagctccgccccccgggttcccgccattctcctgcctcagcctcccgagtagctgagaccacaggcacccgccaccacgcctggctaattttttgtatttttagtagagacggggtttcactgtgttagtcaggatggtctcgatttcctggcctcgtgacagacccgcctcggcctcccaaagtgctgggattacaggcgtgagccaccgcgcccggcccatcagtcacttttctacttcccccaccagttcttgaccgttctcttgattagtacgtaatcaagatggaatatctgcaagtgcaagtttcctctcgtctgtcttcatcaacgttttttttctgataggaaacaacttgcgtatatacagaaatttagcttgatttaataataccaatgctgaatattctcatccaggcatgtgagatgcccatgcaactttccaaaattattttatatgcttctgtgttttttctataatttttataagtttatgtttttatttttaacttttataatttcaacttttagattcagggggtatacgtacaggtttattacatggatatatggcaagatgctgtggtttgggatacaaatgatcccatcacccaggtagtgagcatagcacccaataggtagtttttcagtccttgccctgctccccctctaccccctgcagtagtccccactgtctattgttaccatctttatgttcatgaaacatatttcttaaaatgtggtgctgctgatgtgggagcacacttggagaatcatggtcagtaccgcagttcatccattctgccccaggtttagctggttagatgcctcttaggctggaccgtactttactatttcttctgcccccaactctgtgtttagcatgtcatatgatctcattgagttgaacaaaaaatcaataaatctgaaagtgctttgaaaaggttaaaaagatttaaagatataaaatgccattagtaaggtaatgggatttgcaaaatttgggggtcaggtagagacagttatgtttcccaggcatttcgtcatgagctctagatgaaatgcctcctgtgaatttgaatacattgggattcaactaaagggttgccgtaaatttttctgttgtcatggcacatcaaggaagttgatggataaaaggacatactaatgagagtctaagtgaaaatatgaaatgaaatgtatggtctctaagcgacttttcttcaaagacattgggaaggcatctattcctatcattgctgattatcaggaccactaagcttttttaggaggtggatgaacttgtacagatcctgcctttttgaccatatctatgtaaatattgggaagaaaagtgatgagagaccacttgggaagtgtaaaaagtgagaaaatacgtatctggattcttaacatgagccccttcatgtaataaagtgtaaagttatgtttgataagtctggctgaaaaggatgacgcgggagtccacacacgctaagcataccttcatttaaacagactcagaatgtccccggagggctccctccaccagccaggggaaaataaataaaataaacagtcacatcccaaataggagttatatatatatcttcaatcccgccttagcaacaatagcatttggcttaaaggattacactagaatctctcagcatctcagctatacagggaggaaatcaaggtagaaactcaatacctgagcataaagcaattggaagtttaaagaaaaagcacaccatgaagactggtcactgcaaactcttataatcccacataagcaagaaactattccatttgaacagcccctttataaaaaatagcaaaactctttttctattactttactttttaatgcatcacttctatcatgtgaaaatgtttggcagctctaactaaactcaagagttctggaagaagataatactagtaataataatttaggttataaaaggcagtaacattgcatttgaaatgtatatcttcacattaaaaagaaaataagttttctaaccttaattttgcacataaaatatctggtctatggttaaatgttcctcaaaaccttttccagattgttaaagaagtcatcatgctataacttgagctatttagtctcgtttattttctctttatgtggcagccactagctgttcctactttctcattaccagacctttcacaattattgccagaaagcatatccatttcactgctctgttgtaattttgctacttcttcctttattatactgcttgatctcattcttattcttgtagaattcagattgttaatctgtatcttttaggtagcctgttaacctacagatgacatttttctcccaactccatctataattcaatgcctatgcatttagatccccaaatgccatctcttgctcactaaaaatcctatacttgtcacttctacaataatttaatcccaaagtatcctaattaatggattttctatattttctcacatatttttcaaaatccaagtctcaaattataagttcctggcatgaaaagatattaaaaacctagcgttaactgaatttaaaaagtccataagccattaaagaattatggaacgtgttatcttatttttattaaaagaaaagaaaggaatacatgcatagaaacaacactaaagaaatatatccgccaggcgcggtggctcaaacctgtaatcccagaactttgggaggcagaggcaggcggatcacctgaggtcaggagttcgagaccagcctggccatcatggggaaaccctgtctctactaaaaatataaaaattagccaggcatagtggcacacacctgttgtcctagctactcaggaggctgagacaggagaatcacttgaaccctgggaggcagaggttgcaataagccaagataatgccactacactctcacctggatgacagcaagactctgcctaaaaaaaaaaaaaaaaaaaaaaaaaaaaaaaaaaaaaatcaattcattcactgattatctcttagaagtgagattttagagaattttcaatttttatataccttattgctatactttttctctactagtcagtgtacactagttttattatcagaagaaaagaaaaaagactttttttctattgacaaaaaaagaaaatgtgttttaatgaaagtaaatccatataacatatataatatgtcatatgtatttaatggttgtaaacatttagcacagatcatgtgtaagacatagcagtaacagaatagaagaaaatgaaagataggattcaaaacttaaggtgcttgggattaatctagaaaatgcaataaatcattcaaaatgacattaaaccctacttgtttgtttattttaaaaaatcagagttttttatattcagtatcaggaactcttcttggcatggagacatcctgtgaaccccatcaaagcccagcatattttgcagctaacattctaggggaagacaaaaactgccaacaaatgagcaagttatctagcaatgataagtataatggaggaacatgatgaagagtaagaggagagagggtgacagagaagtgatatacaagttagggcattcatgggaggattctccaagtaggtgagatttttgcagaggggtatgtgacgtgagagagcagccaggtggcgccgtcggggaagagcagaggaagacaccagtgcaaaggccccgaggcagaacatgtgagtggcattcaaagtaccccaagaacccgtgtggctgcaggacagacacaaatcaagatgtgatgtggtgggaaatgatgtcagagagatgaagtgaagtgggagacaaatcatatagggccttatgggccaagggaagaattttgaatcttataacaatcattactagaatctataggaaggtttagggaaacaggatgaaatgaaatcttattataaaagaatcattattctggctctcctgcgaagaatattgttggagaataagacgtaagaaaggtaacccgtttgttgagagatgatggtttaggtcagtgtttggcaaactatggcccatgacccaaatgtagctcattgcctgagagcttagaatgatttttaacattttttaatggttcccctataaatggttatagaagtacctacataatatttttgatgtagcctcttggctggcaaagcttaaactgtttacctatctaacttttaaagaaaaagtctgtcaacctctggccttggcaatgatgttaggccttaggcccctgctgtttaatcatttattattcctccatgcaaatttttattctggagaagaaagagagagaaatgatgattgccagtcagaatgaaggacaaaacatgaagaagagacatatagttggattcaggatgtattttaaaggccaagtgacaagatttgcttagggatcagacacagtgtgtgaaaaagaggagtcaaaaatgactccggaagtttttatctgagcaactaagtcgatgatggtgcccattactgaactggtgatgaatgggaaggaaaaagttgggccagggtagggggaaatgaggttatgtagttttggacatgttaatttcaggattcctaataggcttccaaatagagatgtctaacgaatgtccaaaatatggtgtaaataacatgtaataaagaatttcagaagatggccgtgggttgaggcactggtataggttgaggttttcatattcataatactagtaatcataacaaagatgataataataattaattatcataataatgtcccaatctattttaagcactgtgtgaggtagctgtcagacaccagcaagcacccagcagacctccaccacaaggagcataactgaggaagagccccagctgcctcgctctgcaatctactaccctctttgcactagggcctggtctcccacggacaactcccagtggaggtgagagcatggcagggattccaaggcaagaaggactcctctgatggttgattattgctccaggactccccttcagccttgctgaaacttctttagattgcatggcagttcaggacacttgtacccaatcttcctttcctcctcgctttccttggagtcagacttgcttcctgatggctctgctcttctagacttccctaagtcccttccgttgtccttcacagggacatttcccctaggtaaactcttacaagtttaatcccattttcatagccacttcagatacccaaatgaaacacagcagctgaaatacaaggtctcactaaatcccacttaaggccattaaagcatctctctaaaaataggtgttttgttattcctacgtcacagatcaggaaactaaggattggaaaggttaagtggttatcatagttttcagcctttatttaacaagttcttattaaacgcctactcttttcaaaatcaggtgataggactgaatcaagacttaaacatgttgctttctaactctaaagtgtatgtgtcaaccagtacattgcagcagtggttctcaactggaggcaattttttcagaggacatttacttaataatgtctggagacaatgctgaatgttgtaagggggtggagcatgctactggcatctactgggtagaggccaaggacgctgctaaacatcctgcaatgcacaacaaagccccagcaaccagggagtatccagcatcaaatatcagtagcgcagaggccaggaaacactgcattgcagcagtagaatttcactgagctagaaaaggaggcagattcccagatataaatgagtaacagaagaatcaggaccgtcaggtataaaagtaaaaataaataaatatggtctccaaggagaggaagggaagattcagatatccctaaataagaaaggactcataatcattgcaatacatagttattaaatgcctactgttaaaaaaaaaaaaagcactcaaaatctgaaaggccaaggagaatggaaaccaggaaaaagagctggtttgggctaatgttacaaaaaattgactttttctgaacaaatacaacttcagcattacctaaaaaattgaaaacagaaataaaaggcatgcatgtatgcaatatacacagacacacatgcacaggtacacacatatattgtgtgtgcttagttatattccaggcatctatgctgagcagttttgccacatgtatgttatttctgccctcactttaaatttcagaaaactgaggcttagatctagaaagtagttgaattccagtagaacctagagccagaactcagaaccctgtgctctaaagctgtattctagaatgcctgtgagcaatggaaataagtgaattgtttagtaaaaacattcttcaaattttaagagagttgatactaataatttggtacacaatcctaggaagcttttgaatgtgaatgcagagttgaacgaacacaaacaaacagaaagctcccagcacttttacttcttttggcaggtatgtgtgttgtatatatatataacatataaataataatgtgctatgatttgagacatggtgcaaagtatgggaaaagtaactttatgccaacatgatttacttcgttgtgacccaaggagattttgtaccacatggggaatacagattgacaattattctcatttccatttgcacatatcaattggttaacaacaatttcacgtttaatctattacttttgcagatagatgcattttattgattgaatcaatgcttaaagttttcatgaacatcactttctacagaaaatagtttccctagagggttctaaaacgatactttttagaacaataaacaatggctttgtcatttcttgtagtagtgtttatgtagtatttccactggagactgaatgtcatagtcatcaatacaaaatttgcaagaagtttcctagagaactcataaaccatttgacaaaaatcagtatcaagtcaagagagaaatattctggtcatttctttttaggtatgtttcttttattttattagatacttaattctcttgcatgaatttttttggatagtacgcgataggattcccatacacatcccgtagaagatatattgcttaggaccatgcaatttagatgtttgttataatttttttcagattacattttttgttccagagaagtaaagggaagaaatgaagaccagcaggttgcatacaacacagaaaagatctgatgaaaattctactatggcctgtttatttagaaacagattggccggataatgctaatactaatcactgtcgtggctaaaatttattaaacactctctctgctatgcatttcaacatacacccctaagaggttggtactaaattttccattttaaagatacggaaaaagatacatgataagtttaagtaacctgttcagctagtaagtggcagagctaggttacaaacccaggtgatcttattccagatcagaagatctggaccaaaagaattggaaacaagtctgtccttcgtctactgtaactcttattgaatatcatatggggatgataagttaataaacaagtaggcaaaattatacttatgttgtgaactgtgtggacttaaggattcggtagactggactgtcacttatatgattagaaatttgggtgggacaattaagtttactcccttgagactaaggatcttccattataaaacagaatggactagattatgtaatctctaaagtactttgtcactagttcaaaaatactccaaaggactctggaggccaaggtgggaggattacttgaggccaggagatggaaaccgtgtctctaaaaacgttagctgggcatggtggctcgtgcatgtagtcctacattatgtaaactccaaagttctttcttgctagctcaaaagtatttcaaaggactcaggaggctgaggcagaaggattgcctgagcccagggttcaaggcttcagtgagctgtgattgtgccactgcgctccagcctaggcatcagagcaaggccctatctctggaaaaaaacaaaaaacaaacgaacaaaacacgccagagcaaaatgtcttagtgttcaatcattctttacacttgttttatttatttttaatttttattttttgtgggtacatagtaagtgtttatgtttatggggtatatgggatatttcaataaaggcatacagtgtgtaataatcacatcagggtaaatggagtatccatcacctcaagcatttatcctttgtgttacaaacaatccagtcatactcttgtagttatttttaaacgtacaattacattattctttatgcctgtttaagatgcattctgaatgcgtagaactaaagtcattctttgatacagcagtgtgaaataggaactataaagagtcgctcttatagatggaatgtgcttctgtgttctctgtttagaaacacaggaataaaaatttggaatctcttctgtttggatctcacatggtagaccaaatgccagaaggataaattaaatattacttagtagggggcaaggacaatatagataatttgttctagtaaaacagtctttacttctctttcatgaagtgggcaaagagatgagtgtcacagaacatgaatggggacagctacagcaaaaggtcagatttatcctgtgagagaatcttccatgtgttgggcaccagtggagccacatttttataaatggaaccacgcgaatttaaaatagagagcaacttaaatatatcaaaatacttttactttatatataacatttgaataaaaaaatctctcaagcaaaaatatagttagaattttgtaatttgaaaactggtgagtcaagtccactggaagctagctggctttacccttcacatggtgaaaccactttagctggtcaaaagaaataaccaacgaaattatggagttggcaaaaagatcagtagttgccaagggttttggggaggagggataaataggtggagcactgaggatttttagggcaatgaaactactctgtataatactacagcagtgaatttatgtaattatacatttgtccaaactcatagaatgtacaacgccaagggtgaaccctagtataaactacggactctggtgataatgatgttatcaacgtaggtttattaattataacaaaggcaccactctgggcagggtggtgttgatagtgggggagggtatgcaagtgtagtggcagaggatatacaggaaatctctgtacctttatctcaattttactctgaacctaaaattgctctaaaaaataaagtcttaaaaaatacccatcttgctgccccatgattggttctgatttgtttgacattgtcccgaccacatccccctttcataaagtagcagtcttatgtctcatttaatcacaacaggagcctctgaccatgtctaggcattttcctataaatataacatgacattgtttccatgtaacagtaaaaatattagagtctgtaaagaaaaatgtgtttgaacttatatgtgatgtcatgaagtttatgtgtgtagatattaacaggcagaactgtttcttttgagtcttctgtaagacctcatttagctttcaaataagtacctcgaaagccaaaaatcttacagatgaaaaatgagctatgatgtggattattttttagacataatggtgaagaagcatgttcatgatcacataaaagtgttggtaagaaagaaattctgtaacaaaattactgtatagttcaatctatcagaaactattctttgaaggatgtcatttatcaaagtacagatgctgctctaaaaactacattggcctttaaacatcactaattagaaaggaagtagagcttcaatttgcaatttttttaatcttcaatactattgacatcaaaaaaatcattcagaatgctcataaaaattgctttccatgtttcttatgactaaaaagattttttctgaaatgaattaatcctcattccctgacacatttgccagcattctgagatgaaaagaaaaaaacattattatgcacccttcctgagagagcagtaggggcaggagctgagttcaaaattattcatttctgcttcaaatctttcttgaaatcttttccgtggctgtgatgtgcaagaaatagctggagaatttttatctccaccccctcaagtaacacaaatcatctgctcccccttttacaaacatgaaagaggaaaactgtccatgatgatttgcagagagtgggtgtgtgtgagatctgctatttccatggctggttcagaagctgatgtcacgattacttcctacacagcaatgtgggaaaccacattagcagcaggaatcccagttggcagaattgccaattgtacctgataaatagacagttatttggaggaggaatcctctggacaccttagaaaagtcagtcaacatttcatttagaaattagaagctcctagaatgggatgatgtatttcaaaatctttaagaagtacagtgtggtacaacaataaatgattatttttatagtgtttgtcatcatcattattacattactatagctgtatgcaagtctttcaatagacacataaatgtttctcccaaagcaagggttttggtgatcaggaatgaaacttaatataaaaactaaattaaattgaactttttagaaattgccttgagaaaacctggggtgggaaataaggacttgaaactagactggaagataatcttggattccgaggggacccaagatgattgggagcatgactttggcaggaagtcattttaacatcatggcattgagacataaatgcccacctgaaatagctggtaatatggggactgaagtactcatgttagtgtgacagcagcagggtcactggattgaataactccagggggcaccattcatccattcctttattccaggaagtgttatggaatacaaggtattacacagaagcagcaatttggaaagaccatcttgagagattcttcataaaaacagaaccccagtctataaggtacacattgagatcagtgtcactctgtccatgctctcatcccacttctgtgtagatgtcttctcccatttgctattgtgttaagacatcagaatggatcttccaaggtgctaatctctctccacccctgcagaggcttattgtttcttctgagaaagttggctggttatcctgatgcagccaattgatctgttgtaataataaatgcccactaaattcaattgccaggttatcatttatgggtttcagttcctgctccatggttctcttggaggtctaggactgagcaagacctgaacttggtagttacccatgttccaaatatagtgtctctcaaactttgtcttgactgaacattcctttgttcaaagaaatacttacagagatgcccagtaaatgaaatagagaagctatgaatgctgactttgggagcctttcctgctcattgtcaatacccacatgttgacttcacttgttccacagcagccactgcgggaattccattaactatctagaactctttcatagccagtgctaataacactacttaaacaaaagctgtttcattgtctttaactgaatttcttggggtctattatcaacattatttggaaatgttcccttctccactctagaaatgagctgtgtttctaactgataatttaaaactagcactccatctccatcaacttagaaattaaataaattattaaaaaaaataaaattagcactgcagtatttatctgtacctacggaactgtattattcaggatcctttggttgcagaaaacccaactcattctgacctaaagaggctctattggcttagaggtagacatagattgaaagacttagaggtggctctggattcaagcacagcttgccttcagagggaagagaatatgcaagattctatctctctttctcactcttttcctgttattcacctcaatttaactgatattggctttatttatgggcaggctttcttcacgtgatagtccctaagaagtctttcctgtgattttctttccaagtaatacctacagaatttttgtaactatgattcatttgaccagttgttttttaattaatagactttattttttagagcccttttaggtttatcaaaaaattgagcagtgaatactgacagttcccaaagattctcaacccctccatacacagttttccctattaacatcttgcattgatgtggtacgtttattacagctgatgaaccagtattgatatagcattataaactaaagtccatagtttatattagagttcaccttctgtgttgtagagtttgtaagtgttttgacaaatatgtaatgtcatttattcaccattacagtatcgtacagaatactgttctaaaatttctgtcctccacctattcagcatttcctccctcctgccaaactcctggccactagtgatatttttactgtctctcgagttttcctttttcctgaatgtcatatagttggaatcatacaatgtttcatcttcacagattggcttctttcacctagcaatatgtacttaaagttcctttccgtgtggcttgagggcttgctcacttgtttttatcactgggtgttattgtgttgcatggatataccacagtttgttttctcattcacctatcgaaggatatcctgaatgcttccgagtttgggcaattacgaataagtcactggaaatgcttgtgtgcaggtttgtgtggacataagttttcaaatcatttggagaagtaccaacaagagtaattgctggatcatatggtaatactatgtttagcttcctaaggatctgcaagactgtctccaaaaatggccataccttttttcatttctatctaaatgaatgagttgctcttactccacatcctggccagcatttgtccttttcagtgtttgggattgtaccgttctaatagtggtatctcattgttgttttaatttgcaataccctaatgagactggactggttttagttggtgtccattcttgaatcaagctctgtagtctaggggatggaatatagcgatcaatcagttatgcatcttgggctttttatttaagcccaggccaaaaggatagtttgtgatttacagataacaaattcacaactgaaaagtgattcacagttaagaaagacaagtggatgccatactgataatacatcaggaattcacaaaataaatacataaacaaaaccttctgacaaaatgtaatattagagtgttcatatttatatcattctcaggtgaaaaccacatggtgtctttcaagggtcaaggaaagaggtggtgtacatatgaagtgtgggagttgcaacaagtggtagtgggaaggctgggctccatttcaacaattttttaaaaagtagaataaaatacatttgttttcagtattaattctccattgtacacattgattcatgagtatgtataacttctctctgtataaaacatatcacacagtgtaaatgaaataaacaatccactagaggtcttttacaatttaaattaagctattattcaatgtaattactagtctgaacgttttgaagtttttcaaaataagaactgtggaggttgtttattctacaagatagttcattgcacaattatgaatgatcagcaaaactctgtgagttgatgatcatagggtatgttttagttgagaacatatttttggcaatgaatacacaatgcctattaattaaatcaaagagatattttatatatgttgattcaataaatgttcttttgaaaagaatacattggccaagtaataggtagccactctaaatgcaattggtaaatttgaatcttacagcaggaaaggaagtatgggttaaatgttcgtaaatattggcacaaattagtgatgttacttggggagagaagaagagagttggcgtaaacatttcacagttttataatggtatttgtccaatgattgatttagtcttgtgattgatcattagcaaaagtgtaaaccatatggcaactgacatttataaatgtgcttttatcagtcagttttacccattgagaacagcaatttaaagattcaacactttgtaagtatattaacagtattctggagaatttattgagtaatagtgttggaaagattctgtgtagaatctttatagaatcatgaaagaatagtattggaaaagaatttaaactggtgatagactatgtttacttcattcaaaaacctgtgtttatttcatccaaagttctgataatgtcagaagttagtgatttctggaaatgcactggaaataaataaaagaaaatgagaaaaatgtacttcattcttagaggatatgaattttaaataccatgtgaaaaaatagatctgaccaaaatcaaatggccacaaagtgaatgggtttgctaaagagaggaaaatcctaaatatttatacaaatttcatcagtctctgcctttgttttctaatttctatacattattatatagagaaatttttctaatgtattacatttatagaattttagaaagtaactgatgtagctaccagtcccactaaaactagcaatagtagctgtaggtttaatcagtcggcctttgtgtttaaaatgagacaaattatttttgccaccgtaacagcaaatataagacaaagtacaacattctctgattataaattggagaacttggttagaagttcactcctgcttatcagttgacttaggatatcatttaactatgatttaagttatcatttaactgtcaacttttaataatgttatgacaaagtacattttcactttgataacaattgctattgtcataatcatcttcatcatcatccacattttatttccatgatacttcaaaatagtcaagtgtcacactgcccaagagaagtatatcaaacatggtgccatattttggtcaaaaattgttttgaggtctgaatttacagaaggagaaataagagaagaatctggattgaaataaatcattttatagatgtaacctattaaacacgcattaatataccagaatagtcatttggatcactatgttttctggcagatagagcacttgaatgaagatatacaagtatgacttagtcattaattaatttcccaaaacctacttaatccttctgggacttgtctcagctatagaactaagagaacaaagtcaaacttaagtcaacgcaaggtacttagcttatgtagctagtgtctttcaaaatatctttgaacagtcttagtggaatgtcacttcacatttttctgacatctttaacactatttcggtttccaaaacagttgccaactctctacccaactctttccaccctaccttgggttatgtagcttcctggcttttcattcttcgtctagaataagatcagaattttttcccatgtgacttattttagaggattccagctgtggaaacaaacaaacacatatgaaaagatgtagcagatttcatctgaatattcttttagaattttgccaatcataaatgtttcgagaaaagagtgctcttaaaactctccattagtatttgcccagatttgtttattcaattttgtccagaaagaagggagttggttattttaagtgcaaatacaggactcaatatttcatttattcagaagggggcacacttgtgcttttaatagcagatgtattcggatttgctggtatacaaaatttatacataaacttgccacagatgacagaactacttctcattaccatggttttttaaaaggcttaatacttcttaaacaagaagagtgacagaattcaacatgcaggtttctttttaaagaaggtttttattttttttttattttttttttttttaagttcgagagtccttttaggttaaaaactttgcagtttgttctgataatttttcaatgtgattgaaagacgtctatgatcatggaagtaacatgtttttgacagcttctaatacattttagtttgacctctgactttcagcaatttgatagccttaaaaatattttctctattggttttcattaataatgtgacatcatttgtatgccaagataacactgacctatttggaggataaaaacttatgcaataagctatctttctaccagtggacttaattgttcttagccataattgtttttcccagggacacaagatcgtcttggcatgtttggctaaggaatttactctaaaacctttgaaaatcatagccagcttccactactttggcctcagtgctattatgctctagacaattcaagtatttggtcaaaaatgataaaacccaaacaatttaaaatatacagtaatagctgtgataaatacagaggatacgagaagatagaatacatatacaattaaaatttgctttgaggtattgttaaaaacttatatgggttgtaacctgtctgagaatatatatgacaatgggggatatctttactatataaagcacttttacaaatgataacgaatatttaagataattcagtagaaatatgcgaaggtaaaagatggtcatttgacaatttccaatatggatgaatgggaaattatcattatactataatcagtgtatacaggaagacagacctagtctatatggttgatatagttcatatttttgtccctcttcaaaactcatgtctaattgtaattcccaattttggaggtggaccttggtgggaggtggtttgatcttaggggcagatttctcatgaagagtttagcaccatccacttggtgatgttctcatgatgattagttctcatgagatctgtgtgtttaaaagtacgtggcactgcccccaccactctctctcactctgtctccccttctcagcatgtgatgagcctgctccccatttgcattctgccatgattagaagcctcctgaggtctccccagaagcagatgctgctgtgcttcctatacatcctgcaaaactgtgacccaattaaacttctttacttataatttacccagtgtcttatagtttctttacagcaatgcaaggaagtcctaatacatattttcagtcttctgccctcacaaacttttcaagacagcaatcttgatacagatgttaattgatatttcattttcagatgataatcatgcaatatgtatcactgatttcaatataccccttgactaaccattcaacatctttcttaaggaaatgatctgagaaagagataactgtacaaagatgtttattgtcctgatgcttaaatagtgagcagttggtaaccacataagcatcaaggaaaactaattagttaaatgtgttgtggtacttcataactatttaaatgagtacttcataactattaataccacaaagagagtctacacctattgattttttaagtctacatatgttggtaaattgaaaaagtaggttaacagggagattatggagtaattccaattttatgagagaaccatcattctaccctctatgtctatgagataaattatttagcttgcacacataaatgagaacatgaaatatttgtctctcttttccttgcttatttcacttaacataatgtcgtccagttctacccatgttactgtaaatggcaggattttattctttatggctgaataatattccaatagaccacattttctttatccattcatccactgatgaacactcaggttgattccatatcttcactgttgtgactagcgctgcaatgaacatgagagtcctgatatttcttggatatactgatttttctttcttttggatatgtatctcctttatttgggacatatgatagttttatttttagttttttgagaaacctctatactgttttccatagtggctgtactaagttacattcccaccaacagtgtacaagcattctcctttctctgcatccttactggaatccattattttttgtctttttgataaaggacatattgactggagtgagatgatatctcattgtggttttgaattgcagtttttagatgattattgatgatggcaatttgtatgtcttcctttaagaaatgtctactgagatctttcgcccatttttaaatcatattattcgttgactttttttctactgagttgtttgaatttctaatatattctggctattaaccccttgtcagttgaatagtttgcaaatattttctcccactctgtaggttgtctccttgctttgctatgtgctaactagcttttgttgcattatattggccaagcaagtcacaaaactagtctaaatacaacagtcacagtggctcacgcctgttatcccagcacttcgggaggccgaggccggtggatcacctgaggtcaggagttggagaccagcctggccaacatggtgaaacctcacctctactaaaaatacaaaaaaaattagccaggcatggtggtgggtgcctgtaattccagattctctggaggctgaggcaggagaatcacttgaacctgggaggcggaggatgtagtgagccaagatcatgccactgcactccagcaaaaagagtgagactccatctcaaaaacaaaacaaaagacagtcaacaaagggatctcacctcttgatggaagaaactgcaatgttacattgcagagggcaaaggaaggggtaaagaataggggtcatttttgtagcctgctcctctagtaaaaagctaaattctgagaaaacagactaaatatagaaactcaaattgtaaattcaaggcggagaaaaaggtttactaaatcaccagtgagtatcaaaaaaaaaaagactaaggttttcaagttcttgaagcatacatgtgagattcctatctgaggttcttcattttctaactacagaaacttaaataatacatccatatggataaaaatatcttgtgtcctttcaaatgtgggtaatacctatgattcccttctttgttgttgtgagaataaagcaggattacttttttaaaagttctttacagaggcttcacattgcagttacttcatgagtgtctagaataattcactgactttattatgattaaccctgctgtagttattagtgaatcacactggacaaactaatgaactagaaaatagaatcaaagaatcaatacagtggaaataagactgaagttgaagatatctggccgggatcatggattctagatctgtgcaaccttaggcaagtcacagtatttctctggacctgtgtcgtttctaagaaaatgatgcttcttcttagagctgaaatgtcattctgctctaagaaaattacaaccaagaatgttcctttctcattttcattttccacattgtatttctgcttgcaaaacaatattgtattcttgtatcagagagttttagggcaaacaaagatgatcaagtgaatatctgaatgtttgggaaaggagtggaccagagtgaggagtcccaaaattatcaccccagttgttaagtagctgagaaggactccacacattattaatatttctggttatcaggcctgtctgaagttattccacataatttttgttttcagttacagcgatgtgtgactaattgttcgtatgcgttcttaatgagcatatatcaaatttaaaaataaaatattacttaaaaatactacaaataaaatcacacaactttgaagctgagttctgttaagtagctgaatgtgtgaattacataagaatatgagatataacctaatgtactaatgcatcttctagtatctatcctacactgctctggttagcaccagtggctccaaatgacgagaaagtgtcatgacatcaaacaatagggcagaattccaccaaagaatactgaacacttttattaggaaaataggaaaaggaagaaaaataggaaagagtggcagtttctttggacaaaatctgagtaaaaattattaccctcagggtagaaattttcttaaattgggaaatcatacctcgagctgacagcttgggatatttgttcacaaacctattaacttctctatagcttcccattaaacatcacaagtagtttattcccatatcttctgggccagtgggccaaatttcgccttgaatttctcattcctatattttctttggctgttttactgatcttcacgaactttctttttttttcctttcctttttttttttgagatggagtctcactctgtcgccagtgctggagtgcagtggtgtgatctcagctcaccgcaacctccatctcccaggttgaagtgattctcctgcctcagcctcgcaagtagctgggattacaggtgcatgccacggtgcccagctaatttttgtatttttagtagagacaccttgaaactataagtgaagaggtcacctcaaaatatacaaagtcaaaaacaggcttctgaggaggtaaacgtgttttaaataaggaaatctccattataacttctaaaatgtcattcattcagaaggtaaagcaacatgaaaatagaccttgaacaagactctttttcatgtctatttaaataagaatgctattgaatttgtggtgctaataaaatagtttaaaatttatagcattattttctgtatccaaataagtgaaaatatttttttaatattatttagtatggtttatagtgagttagctctgaggatgctaacactctctaatacttttcccccaaatgttgatatatttgtatttattctatataaaacattcaaatagtattttaaaatgatatccacagtgtcatccaaaaacctacaacataattttttagtctttattataatttcaattatgtggaagttaaacatatgtgactataacactttttttagattgtggtttacaaaaaaaaaaatcattcccttgttgaataattcaataggtttatattggcaaaatccatgttctggtcacttgggtgcagcccccattaagcctgtagtccaatggaaaaagagttcagtaaattcttaaaactgaaaacttaacatgcagtataatagttctatgctggggtcaacatagtgtattacaattgcatattgcagaatccttttatttgaacttacaggttcagagagtttccagggaaagtaacatggaaggtaatatctgacaaatcagtaaaaatcagccaaagacatggaacagaatgcttcatctcagtgagcattatatacagatgtataggggcaataaaagagttggcattctttaaagaagtaagagttcaatgaaactagaagttagaattcctgaaaagatgaaatggagattgggaataataagtctggagtggtaagctggggttgcatcatggaagttcctttctatcaagttaaagaatttgacctttctcctaagaggattggaattctacagaaatgttttaaataagaaagcagcctggttaggttcacatttcagaaaaatcatttcattacgaataaaggatcatagacaaatgagagctgcaaagacagaggctgagaaactcatttggagccagctatagtggttccaggtgagagatgctattggcctcaactagaatacctcttagtggggatggagacaagtagctgcaatcatcatatttttagaagattaaattgagagggcttcagattggatgtaaaggagggttaggatcaagggttaaggaagctaactagatttgtgagacctgtaacagtggtgattgattcctcaaccaaactaggaaacataacgaaattggcaagcgaaggtaatgcgatcatttggtggcatagtaagattttctttctgtaagacttcaagtgagatggctagcagaaatttgtacctatggattatgaacaaagtccttttcaggaacaagatctgagctagagatataaactttgagaatgtcagcaagcagatggtaattaaacatatgggagtagataatattacttggggatgatttataaagaaatgattctcaaactttggggtcagattaattacccaggaaacctaataaaattcaaaatcctgggtaccaactccagagtgtctcattgagtatgtgtagaatgtagttcccaaacctgtcttgttgaaaagtagggccccacccccaatggttctgatggagatgatattctgaccccactctgaagtataatgagaagaggatcttgcttagtgtcctgagtagtatcagaacataagcgatggacaaagaaagaggaacccagaaagaagactataaataagcaactggaggtactgaaggaaaaccgggagaaaaaaacattacaaattctataagaaaatagcgggtacaagagtggtgaacagggtcaaagtgttgagagataaagtaaagataaaggctaaaaacacccactggatgtaacaaaaaggaggtcatcacaaagttggcaggaacaattttggtagaattatgtgggctgcagccagattgcagtgggctgagggttgaatatgagatgaggataaagagacaagaagcagaggcaaaatgttataaaagaagttcggactagaagggcaggaagttgctgcagcagaatgtggactgaagggtgagatgtttttaggagggaaacaacttgagtgaatgtggtatctcatacctgacgtgctgcatccctaatttcattttaaagtttttttaaacagattcattgaagtgtaatctatatattataaaattcatctttttaaagtatacagttgatttttttttttttttttttgagacggagtctcactgtgtcacccaggctggagtgcagtggtgcaatctcagctcactgcaatctcctcctcccgagttcaagcaattctcctgcctcagcctcccaagtagctgggattacaggctacttgtatttttagtacagacggggtttcaccatattggccaggctggtctcgaactcctgaccttgtgatccacccacctcgacctcccaaagtgctgggattacagtgctgtgcccggcaattcaatggtttttaataaaattacagagtgtacaagcatcaccacaatctagtattaaaacattttcattgctccatattccatatacccgtttactgttaatccacattcttacactctgccccaggcacatacacatgcattgttggtctctacagatttacctattctagacatttcatagaagccatacaacgtgtgtgttcttttgtgtctgggttcttttgtgtcagagttcttttgcttagtatattgctggagaggttccctcctgttgtaacatatatcagtggtttattccttttttattgctgcattgtattccattttatggatagagcgcattttctgtatccattcatcagctgatggacatctggataacgtcccctttttgaccatcattcgtgaatgatagtgctatgaatattcacatgaaaatctttatgtaagcataggttttcatggctccagggtagttatctaggagtctgattgctgggttgtatgttaagtttgggttgaactttctaagaaatggtccaacgtctttctaacgtggctgcaatattttacattcacactctttcatccctgccctaataagcacatattcacttacttttatacctgcattcattgaaaaaaaaaaaaaaagaactgtcccctcttggatagtggggagcaaagtaaggtgctgctttgggttctgtgcattatggttaggccaaaaatgatggaaatatgaattagcatcagcctgccccctagtggtggtccagactgctgtgcagtcaacctaaatccatggggccaaacttctaagcgatctactctttccttcactcactcttgtcactctacctccgtcttttctggcaaagaccaaacagtgggcaacgagtttaagtatgctcaaacaaatttagaaagtgtatagtgaggtgcagtggttcaccagtatcaaaccgtctaccagtcatgtctaccagagatatggacacttactctcatgtgtttaaggatcagctgctgggggacttgggcaaagttactgaacttcatgtaacctcagttgtttctttatctctacaatgaggattatgataacaccaggcttagttatactgcagtgattcaatgaaatttcatatgtaaagcacctaacatagttaaacctagagttggcattcaagaaaaagtaagtattcaaattttatgataataaaagtggtcacgagtgtagtcaaatgctacaatgacattctattcatataattattttttatctgttctcatttacttatatcctatgtttatgctctctatttaaaattgaaatgtctttgaatttagaactacagttgactgtatttatttgacagtctacagtgtactgtagacaatttatttgatattgataagaatcacaaaagtaacaacaatactatccttcattattttatagtaacaatatatcaggacatttgctaaaatctccctgtatgtaaaatttaatgcagaaaacatttttataaggtaggtaaagatctcagtctgtgttggagaaaatatttcagccacatctttctcgctgcacccattttcactacctgttgtgctgccactgccaatggaaatgacaatatcaattacagctggttgataattgagaagtatagagactagaaaagtgtgtgtgatgtggctcagatctggattctcatgatcttttgttgctcttttgtcaaagagaaaaagtaagaccagaaatgacctgagtttgatgattactgcggtttgcaattcagcaattcaagatagttgcactctccttcccaatccaccctaacacctgcttccttttccccattaatagctaaagttttctccccgaaatagtcaaaggttcattggaaattttatccatgtaaagtaagtacataggccttcctttgtttttctcttaacaatgctgcagactatgtttgtttggaatctgttctctgatggcagttgttaagttattcattttaatgggtgttttataactttaaaaggaaaattgtttccagggaagagagcatgcctctaatacagaaatcaggtatttagggggaagaacaatctaataaaacactttggacagcccgtgatagtgttcagacacacagttctagaagagaaataagaaagcatttctttggccaaatgtgatctgaaccatccgggtttttgcctcacatactgtaagagacatttattctcttcactattcaattattttgccagcgagatgtgggaattaaagtagcagcaatcatgataacatgtgtgaagcatcaaaatactttgcactgagcagacagagatgccaattgtattttcagcttgggtttacatatggaaaatattgttattatttccttcaatgtcatcagtttttaatggctcctattccatccaatttttaagctgtaaatatagtctagtatttgaaaagaaaatctaagtagttctaatgccagaggctggaactagtttgccagcaaaattcatctttagtttacatgtatttggatgcttgattatatgtccccaaatccagtcataatttagcccagaattttagactaacagaacgcaagtgtagatacatttgtttgtctcatgcagtttaaaaaaaaaaatctgtgagcaagcctttaaatatcaagagattccacaatctttatttgggcttctcttcatgaataaaagattttaaaatgctttcttatccctgagtaggacaccggacagataatgcatacttacactctactatttgatatttgtccaagacctcctaaacacctttgatttttgcttaatattactcgatatttaatctactgaaatattttagtccgtctttttttttttcccctgtagaaaattgagtctaaatttaaagtggcctttctaatgcaatctgagccaaaaggtataattcactttaaagtaatttgggggcaagcttagaagtgtgtaggcagtagggcaaacatttatttaatttcctatgctactacagaaacgataataactaacaaacattaaatacttattctatgtcaggtgctgaggtttatatacattatctcgtgtaattctcacaacaggccataaagcaggtgctaaatgctattattagtttaacagcaataacaaaaaaaactctaaacctcagagcaggtatgtgcattgcctaaggtaaggtaagggactgaactaggactgtcttctctctaaaactcacttcctcaccactcactctcttactctgtcttaccttgacattacattctaaagtattttttaaaatatatttaggtcctgcacacacctgttattcccgcactttgggaggccgaggcaggcggatcacttgaggccaggatttcgagaccagcctggccaacatggcgaaaccccatctctattaaaaatgcaaaaattagccaggcgtggtggtgcctgcctgtaatctactcaggaggctgaggcaggagaatcacttgaacccaggaggcagaggatacatgagctgcgatcccaccactgcttttcagcctgggtgacagagggagacactgtttacaaataaataaataaatgtttattttaaatgtaagtaattaaaaacataaagctacataaaaatgcatatttatatatataaatattcatcttcatactgaataaaatgctcaaggaactctctgctcctcatcacaccttttgggtcacagagggtcctctttttatgatggcccatcaaagaggtcagtgttaggtagcattctttcccaatattttccttttttttttttttttttgctattgtaaatgaattatgtatgcaccctgaagtaattagcaaagacgttgttgttcagctgaattttaaactaattaatctgacctaattcttgtcaaaaataattaggataaaatatgtcctccctaagcaactctttgaagctgagacgctaaagcacagtacctcctgtgtatgcactgctctaaaattgagagggccatttatttaacagttttagaggaaatgctaaaatgctaccttgtgaattgccacctgggcatcatctcctcctcctccgtttctatattcaaataaagaaaagaagctgaactaacaatgggactataacatgagtggtctcaatgagcccttcacatcacgtggtttacaattaaaacatcaaaactggttaatttcttctcttccaaaaggcttcctgctgaatatgtgtgccccatttctcagcccattcactttttttttttttttttttgagacagagtcttgctcttgtcccctaggctggagtgcagtggtgtgatctcagctcactgcaaccttcacctccccggttcaaacaattctcctgtctcagcctcctgagtagctgggactacaggtgcctgccaccatgcctggctaattttttttttttttttttttttgtatttttagtaaagacggggtttcaccacgtcggtcaggctggtctcgaaatcctgacctcaggtgatctgcctgctttggcctaccaaagtgctgggattacaggcatgagccaccgcacctggcccacttttcttaatacaaaattgattaagctattttctgtctccccatcccctacctgccccaaataagcttttaaaatatccttagtgatataatgaattgggaaaatgtctcatgtaataaccaagtcctaagctatatgtttctagaaaaaataatttaggaaaagcaaataagcaagctttacccatagctgcaggttgtcagcaagttgagatgatctcgggttgcagcaactgtggaggtttgtatatgctggtgtttgcccaaagccttcactactgccctgtcattctatagcagcctcttctgcgtgccccctaaccttgctctcagacatattacggagctcttgggagaggagcgcattgtgggatatatctatcacatccccaagcagttcagagttaataatttccttattaaacctatgaacccttcatgttttctagtcctccctccccaacccccttccaagttagtttctaggcaaccaataagcactgaattacattaagctctttatttcaaggctgcagttcagaattttgctgcatatttgttggctcatttatagagactgcagcataaaatgtattaattctgtctaatctgcagtacatcagtgatttggttagaaccacattacccgtacctgtttttcatgtttaaatcactcagtgccatgatgctcttctttatgcagcttatgccaaagatactgtgagctctaatttgaaatcatggaagcaagaatttccacaattcccagttcctggttatcatttagcaccttgagatagtcttttaggaaattagaattttcaaaatctccttttttgaatggccgaaatgtctaacagatgacttttagtaagaaagatcagaaacatacggttcaggaatagcctgaaatgcaggataaaagggaggatattgtttgctttaacaaactgaaattttggtgtgaaagagaagcaggcccttgaaaatattcctttgttggtatgaatcaaggaattgaggttgtaatttcaaattttaccaaggacagtgtgagaatgaagattaatcttccagcaaaaaagaactgttctctgttttgaatgttgaatggtttgagatattctctagaaaactctgagcaagcatgctctctttctctctctgtgatatttataaagggatctggtaagtctctaagtgtataatatattaaggtcctcacaattgagcaaaaatataaattaaatgttagttcactctgtagtttcttaaaacacaaagcagtaatctacactggccacactaaaatggtggctttgagaaaacaaagtaaaatccttttaaaactcaaacttgaatctaatctctttcctttcacctgcttataatgtagctgagacaggtgtgtgtggcatataaagctgtagaaataaattgaatggtcttgtggcatagaaagccagctgcccactagagttgcatggtagaaaaaccttctaggagaccctactgccaaggaggagtggcccagattaggcagcaactgcatcttccaggtgactttgcacttagaggtgccacttactggatttgcttcagtaaaatatgagcagaagggaggtatgccatttccaggcctggcctacaagatcttctgtgtgatctcccatgtgcctgcctttcttttttttttttttaattttacattcttttatatcaatagtttttggagtacagttttggctacgtggaaaagttctttagtggtgatttctgagattttagtgcacctgtcactcaagcagtgtactcccatatgtctctttcgtcccccccgtgcactggatatcactaacctctcaacctggggaaaagtgagatgttttgtcaaagcctccattaccagtgactgcatggagtatcacctgtctagatccctgacaataaaactattgtttatcactgagaatttgggtatatctgtttcaacagctcgttttaccttgacttatagacgtgccatgcatgagtcacaagataggatcacttcagtcagtagaaccacaaatattcttgactgcttactatgtgccttacaatgtagattccaaggattctatggtaaccagacaagaatggcttcttaaagtagtaggaaaaaaaagacacacttcaaactattgcaatcaatctattaattatatacatgtaatgaaatgcaaaatagaaatttagtacctatagagcatataatatagtaagatttaactacagtaaggtttaaatacagtaagatttaaactactctggggtttgacaaatattttcattcattaatacttattatttccaaatgttagttcagatgaaaataaatctggatttcatgttatacatagagagctgagtccagagtagaccagtagaatcagtaggttaaattgtttcttcctctcctcccccaatgcccaggaatcaggatgcagctataaaccatttattaaataaatttttcttttcctttgagaaaaggaggctgggcgccgtggctcacgtctgtaatcccagcacttcaggaggccaaggcaggtggattatttgaggttaggagttcgagactagcctggccaacatggtgaaacctcgtctctactaaaaaatacaaaacttagctgggcatggtggtgcacacctgtaatcccagctactcaggaggctgaggcaggagagtcacttgaacccaggaggtgaaggttgcagtgagccaagattgtgccacagcactctagtctgggcaacacgtgaggctccatctcaataaaagaagaaaaaaggaaagcacttaggaaacatttcacttaatccttcctttcctagatgaggaggagaaatgtattttccgagcttataataccttccattttaatatatggaacatttagtgtgggccagaaactatgctagttgctattttttattgtaaaatttaatagacatatagattagtgcaccataaaaatatataggtcagtgatttgtcccccgaaaaaaagaacactcaggtaatgctgcctaaatcaaaaaactgatcattgcctactcctgagaatcactaaacagcctggcccaatcccagctacctttttccccacctactacccttccttttatggtcatggttagtatctctctttatagttttactgtattaccatgaattcaaaaatactgggctttataattttttgaagtttaaatacattggatcttaacagtatatattcttgtatgtgtgtcttccctcactcaactctacgtgtgtggctttcattcatgctcttgattgtagcattccttgggtctttcccattctgttgtatgaacatatcacagtgtattccattgtatggacattatacaatgtatctagtttagtatgaatgatatttagttgtttgttatgaatagcagggttctacataatcttatacctgcttcttgacacacaggtgcatgcctgtacttccagttcctaagtttcagactttggtgttatgttatagcaggcacccatgcctctgtatcgttccccaaagttattttcttattttaaaaagttgggaatggagggctgggataacgtaatagagccagatatactacactggccgtctggttacagtgccacagacatttagttcaatatttaatgggtgaagctgagttccatcctgtatcattgaaacaaatgactggagaaaacagatgatcagtatcctctttggaatgccattactcatttcttttatttgtttaaccatttttaacgtgggtaagatgagtgtattcttgctctcaagtttgattttactacttttaatgaattttttttctgactttttggtcaagccaagttttttccacatcatagcataagctgttccctttgcctgaaatgttcttattttaaagctttgcatgattagctaattccttattatgatagttttaacttaactcagaagtctcccttgagtatcttacctgccccaagtcactctttattacattgccctttatatttgctattaaagaatttatcactacatgtagctatcctgtttatgttttattccttttaaatgtttcctgggacctccttttcttgccttccagaaatataagcaccaggaatctcatctcttttttttcttgagcaagctctctccagtgtctagaacaatacatggttcataacaggtgttcaataaatgaactaatgaaaatgaaagaaacaaaggaaggaaggaaggagggaggaaggaaggtaagaatggaaagagggaggaaagaagaacggaagggatattcatggagaccaaggagtaaagacgctctccacttgatacaaaagttttgtgattctgtaggacaggtataaatgaaagaagatctgtgcactcaactctcataagttgactgcaagcaattcaaaatgtaccgaaccattaaaggttagaaacaggcagggggcccagtgtttccacacagcgatgtagactgaaggcaataagggaaaccaaggacccgggagagcgtgtggccatcattccaattttctatacatctccgtgccaagctgtgtatatatgagttgctaaccgcatgactcatgtgaatctcaaagaaagagtctgagtcaaaagcaacctcggggttactagccatggaagcagaggagggagagtgtggttattaaacattgttgtcaaagaacaaagaagagacaaaaaaagaagaaactcagtaagcaatggttcagtattctctcgcattcatttgaaggaaattggatgacgtccaaagttttaacgtgagcaaagagactggataacccctgggagaacttgtcatcttggcaggctctgcaaaatagcttatgtctatcactattgtagtaacagacaaaaagggttgatatttataaggctctgtaagaatgtgtagtaagatgtgtctaggagttgtctccagaaaatcccagagcaataagagtcataaactaggtacaaattccaggagttgaccaaagcattaacaataaaataaatatatttttgacacatgaaaagaagagaggcaaggactcctgtaggtagattcaataggaatgtaatataatatttgtggttatggacagtgaaaatgtttaaatatctacagtgtcaaattgacatgtattaacccttgaattgataatgggttctactcatttcggttgtttccttctccctccaaagatggtaactttaagtttactgtgttagctggaacagaaagtgactcattttacagacaacttgacaagaatataaagttaggaaaggatggtatgaactgtgtcctataaataccaaattccttttctaagtcattgctgaggaaatagtaaaatagaacaacccaggatatccaggaaaattatatgggagagtagtcaatagattgcagagggggaaaatatgagcatttctgagcaaaaaaacaacaacaacaataaagtgactttgatgtggtgactatgacgcctaaatggagcatagaatctaggacagagagccgcctctcatttgtgagagctcagagagtgagagttgtgctgagtaattttgcttggcaatgaacttaataccttcctcttcttcccccaattaaaaaaattgcaaaattagacgaggtaacagaggtagattatctcccttctaatgcccacttaacattccaaacatttatttatcaaattgcaagccctatgatatgaaaagtggagtccattttgctaccttgcaaaaggagcttcagcttcccatttctcttgccttgtggttcacatgatgagaacgacccagatgggttatccctgaggaacaaagagacccaaaagagtgatactgacaacccaaccctgacccatatctgccctaagagctggcaagtcctgtgggccttgaggatgctccattttcccattcatctcgaagaacaaaagtgtgactctttcaactgggttcctctcaagaatccagagcgtatgatctatttaactaaagtagcacaggaaatccccaaggctaaaaaaagaagagccagtctcagtgcaaccctataaaacttttattattttctagtctagggatcaaggcaacattgaaagaaaattctcagttcctgcttcacttagaggtagttcaagtcagggaatcacagaatttcacagccaaaagacatattcttatatatctactgcaacatcctcatgttcctgatgagaatatcatgatccagggaggagaggtgacttaatacaatttgttccttcatgcatttatgtaacaagcatttattgagcatcaacaatatattgccatgctgtgcatttcattagggagtacagataaaatagtgcctaaggcttaactcttgcccttaggaacttgccatcaatttgacagttaggatgagtaaactgagaatggcactactaggcattgctggagcacaaaagaggacagtgtgcacaatggtaaacaatgcaggctgtggattgaggtactctgagttaaaacactgcaacactgtttgcatgttgtatgaccttgggcaattgatttcgcttcactatgctccaatttccttttcataaaatgttgagaacattagcatctattccatagggttctttgatgagaaaatacatacctagtaaagtatgtaggaatttgtaactgattaataaatgcagtagtagtagcagtattattattattattactaaaatcaagacttggaagtcaaacaaaaagcttcccagcattgtaatgaatagaccctgaatacgttaaagttcaagaagtacgttctggcaaaaggaattaggttattttgtgatgttctggacctggttttctggactgtgtttctgactttttgtggctttttgaatgcccagtttttatcttgggtcataattgcactgtgcacacaactctagagggtgcctctcatggtcataagatttgatcttatgtgtagtcctagatttttatctcatgtgttccagcaaatggccgtgaagttcataaggaaggagctaatgcacacaaaggccttgtttcagtgtaatgtctggcttcttgaggtatttattccaactaattcacacatgatgaactacatgaaaacatgatgtcttccactatcgattgtacacattttggactgcatcagttatctattactgagtagccactccaaaacctggtgcctgaaaagacaattatcattgagtcggcaatttgggcagggctcagtagtgacaacttgtctctgctctgtgcaacattagctagggcagcttgactaggagctggggagccactttcgagatggctcagttacatggctggagctggcaagttgaaggtggctgttggtggtaaacaagtttaggatatgaggcctcatttcctgccagctctttatttgggcttccttatagcatggctacattacgacagtcagacaacttacacagtagcatagagctcctaaatgagtgtcccaaaagaaccaagcaaaaaactctgtggcctttttgacctagttttaggaattgaatagcattggcattgtcatagtggtaagccgtagttgtaagattgagggggaaagaacacagaccctcatctctctacaggaaaagtgtctaagtcacattatgagaaaaatatgtgagtggtttttgaaaaatatatcctcccaaaaatgccatttttatcccgcccacctgtccagcacagtgtctgacacaatattgctccttaataaatatttgctcattaaatacatacagcgtatgaaaataaataaatcaataaatcagtgttacagtattattgctgtagtttctatttttttggattgacactgagttttggtatcaaccttgacccctggttttaaattttacccttcaatctgaggatttacttttgtatctccacagttgatactggagtcttaaacttctttggcgactaaagaaaagattacaaagaaagattggtagtgcctttgagagaagtaatatgaataaacagagttgggatttgactgtaaagacttatcaaggcatcaaagaatattgtaagagagaaagatagttctgaaagaggaaaataattgataatgaacttggttgggatgaagggaataagatgacgacaagcaatctggcagcttctgggggagcagcagccaaaagaagcatcagcagagctatgtttaattaatgaacagtagcagaagagggtgctctaaaaagattagagatagcaattgaggctatgcctcctgggaggtattggatgactgaagtacttctgtgtgtgatgtgattaaaataatcaacgagaatgttgaacatcaaatcatgaatttaaaagatttagtgttcccattgaaagctatagcaaacatcaaacgataatttctgattagtcttggagtatgtggaagaccaccaatataatcaccgctttcaaatgtcatggaggaagtgtcttatcctttgtccactgcaatctgatgtattactgcccatcaagattttagctctgtgtccttgtggtcaaacgtattcagacccaaaaattgcaacttgaacttgtaatttaggataaattacagattgtacgtttttcccctatgtcatccataattctatttctttttaatggaagcaaagaaaacagtttgtccaatcttgttagtaagtagaaactcctcaaacttcagaagagcaacaaaatagactgcagctgttcacaccactcctgactatttcactaatagcaagcatttcttggacttttccagaacagcttacattttgctaattttggttgaagtcaagaaaaaaagaaatgtgcttttttaaatcacttcttatcacccttctataaatttttgtcgtaggagaaagagtaatcgcatataccaggatttagctatcacgcttccgagtgccccaaattaacatgagagcagtatcattcccatatcttctgactaaaccattctgcctgctgtcacaatactacaataaaaacatgatgtacctgaatgggtttgaggaaaaacatgctattagtatgtgaggaaatttatgtttacttatatattaacggtataggatttgtacggacatcacagttttatctctggatttaaaaattacttctggctccatcactcaggttggagtgcagtggcatgatcttggctcactgcaatctctgcctttcagactcaagccatcctcccacctcagcctccccagtagctgagactacaggtgtgcaccaccacactcagctaatttttgtgttttttttgtagagacgaagtttcaccatgttgcccaggcttgtcctaaactcatgagcttggccttgcaaagtgctgggattacaggcgtaacccaccacaccggactgcatagaaaattcttgacttagcttcagatttaccatgagggctttaaaatattatatgcatatattaagaggctaaatagtcaaagacattgtctattttaaaccatgcttcttgagctgttgttttctaagtagaaagttaatttatgttttattgtttataagttggaattaaaaagtaaatatatgctttcattggtataactcaacctttagattaaggtgtcagaagcaagctgggcatgagccattcaatattgataccattgacctactagtggtgattccagatatggcaaactattataacagaccaaaagtactgcataaagatatacaaactacctcttcaaaatgactgccatgattctgggaatgaccagtaagtatgttgttggtttgtggagatggccacataagcgggagataaaattcagatggtgctgcggttacacagtgagacactgacccaaaaacctaaagtcgtttttctttattcctaccaggtcatcactctcccctaccaccttctcatagtcctaatcagcccctataattagatatttatatgtgtcttaatattcttttttctttttttgagacagattcttgccctgtcacccagactggagtgcaatggcgtgatctcagctcactgcaacctccgcctcccgggttcaagcgattctcctgcctcagcctcccaagtagttgagattacaggcatatgagaccacgcttggccaattttttgtatctttagtagagatggggtttcaccatgttggccaggctggtcttgaaattctgacctggtgatctgcctgccttggcctcccaaaatgctgggattacagtcatgagccaccgcgtccagcctgtgtattcatattcttaagtatgagaggtccctgatagaaagcccatgagtagttcgtgttctctctgaatcaccaggaactactacagggttttgcatatagataggcgctttgctagtttttattgaagggttaaaactgccatgttgggaaaaagatttctcatttaaacccaatgagaggaatgctgggatcattcctgtcttactgctgtaaaagaatacccgaggctgggtaattaagaaataaaagaggtgtatttggtttacagctctgcagaccatacaggaagcatggcaccagcttctgcatcttgtgagggcctcaggctgcttccacccatggtggaaggtgaaggggagctggcgtgtgcagagatcacatgaccagagagggagtcagagaatgagaggtgggaggtgccaggctcttttttaacaaccagttctcacaggaattaatagaatgagaactcactcgctgccccttcgccacaaggagggcattaatctattcatgagggggtcctcccacccccctgccccaaacaccttccattaagccccaactccaacattaggatcaaattttgccaggagatttggaagtgtcagatacccaaaccatggcagttcccaagcatagaatccgggtcttcagctgatgctcaggtcaccagcattgtcttctctctggcaacagagtcacaggagttgaattcagaatgtcttttctttttcacatgctcctttaggcatccttaatatctcaaagtggcatccatgctataaagccctcaggagagtcaagtcatgtggtggaaacatatgagtgaaatctagcaaaaaataataataaataagatgtagcgaaccatctcatctttcagttagtggcatctccctccagggtaaagagtaaatgttgactagaccatgttgtccgtccgaaagaaggaaaatggctttttctgttcagaggctttattgttttctcttctgactgagacaagactagctgcaccatttcttggttgtgagttcctatttgttcccctgtgcatgccccacaccatctggcatggcactttgcccacagaagaccctcagcaatatctgttgacttcaactgagtcactctatttagctatttggaggcaaatgtggtagaagtggaagaaaaaaaaaaaagaagtaatggagttgcaccattgcactgtccaaatttgaggatttagtgtgggcactggcacttttgagctgtgtgatcttaattcagttgcttgtactctgaaaattttagttaaatagtgtcatatttaataaaatgatataatttttgcaaaggttttggcataatacccatggagtgtgtgagcatataagcacactcccctacaaataacaaatgaatatttattaacaaatgcaaagtaaaacttaacgctccgcaataatctcctaaacgctcataaaaccaatataatcaaagtatacacactcccccatgattttagcataaaaaggcagaagatcagatttggtttgtatcaagtcacagaaggtttaccaacgacgttaagagaaggatgaaaataagaggtttttgcttcctctaacgtgttcctacttttctgaaacagcgttgtggaaagatattagcatatttggtacctcttgggacttttttaaagggtgctttaaaaatatcttctttgcaatatccataacacgaggaaggtgagactctcacaagcttaacaggagaaatagatcagaagcttttttttttttctaaataaagaacttattttcatggtgcctggtctctctgacctaaattgcagtaattcagtatgtgtgaaattactttttctaggacgagaagatcatagcaaaaaaaaaaaaaaaaaaaaaaaaaaaagggagacaaaaaatggtgagagaaagagaaaagaatatacaatataggcaagagttcaggctgtctgataaagagcttgagaataataagaaactaagtagttataacaaagcaaactcagaaatggaaactactaataagaaggactagcaattatctccactgagcagccatgtttaggagaggtcagaaggtcttttaagaactaaaataaaaagatgttcaggccaaagtatggcatctgagttctctatttctagggcttattttattaaactttttatcactttcaagttcatgatgatggcagagcagatttatttctgtaattaaatggattgttatttaccagcagatataaagctggcataaaaagacacatgatcagtaacatagttcagactttatgaattattagtaaaggctgatgaatggtattgttattcctctgcacacaagtttgtgaattgtgttttaggtctgaacacttgcagcagatcagcaaaagccagtttccagcaattcgtgaccatccatagttctttctgccccactcctttgcttcaggatcagtcataaaaatatctcaaaatataagcttttcatagtgctgtggtctgcacttgaacaatgtgagttacagtcataatattatcgctggcaggtgttatattgtgggttggattttgtaaactgggatttgatgtgtgggagcatcagcttggggctggagcttctcatgttaggggtgggtggtgtacgcacagacaggttctacatgagtcagtctgatacagagttagcatttttacatggttgaggaaacttctggaggataataatgacttaactctgagtctcaaggaccttgaaattattaaatcttaaaggatctataatagagagaaagaatattataaaaatggtgcagtttttgtggcaggaaaggggaaacaaagtaggaatgtcatgtccagaatccacaataaatctctgctgaactttttcaatccacgataaaccttttgagttcatatgtttaaataattctgcccataaaatctacctaagttgaccaaattgagtttgtggatgaatgataaaagaacatacaattttaagtttgaaaagtttaataaacctgtatcagattttgcatagaagaacatcaaatgtctctttccctttctagtgttagccataaactactgggagtcaaacttttgagctttgcaaagaagagtgaagacaagaacagacctaatggtaacatagtccatttgctaatatagttcagtcaagatgagtatggttctgctatgttaaaaaaatatcccactgactgatcatggtggctcacacctgcaatcccagcactttgggaggttgtggcagacagattgcttgagctcaggagttcgagaccagcctgggcagtagagcgagacctcatctctactaaaaaaaaaaaaatcacctgggcatggtggcacacatttgtagtcccagggactcaagtccctgtagttccagctacccccagctgagatgagaggattgcttgaccccagtagatcgaggctgcagtagaccaagactgaggctcagtaagctgtgatcacaccactgcactccagcctggacgacagagcaagaccctgtctcaaaaagaaaaaatattccccatatctcagtggttcaaagcagcaatggactttctctctctctctttttttttttttttgtttgtttgtttccttgagatggagtctcactctgtcacacaggctgaagtgcagtggcacgatctcagctcactgcaacctccacctcccaggtttaagcgattctcctgactcagcctcctgagtagctgggactatagacctgcaccaccacacctggctaatttttgtatttttattagagacagggtttagccatgttggccaggctggtcttgaactcctggcctcaagtgatccacccactcggcctcccaaagtgcagggattacagatgtgagccactgcggctggctgacaatagactttcttatgccatatgtctatcttgggtctgcaggagtctcttctttccattgtcttcagtcagtgacacgagttgatggtctttccactatgtggaatatctctttaactttggcagatgtaagaaaatgtgatgaattgtgcctcggctcataaagaccacatctcacatattataggtctaagcaagtcacctgcaggcccaacttcaagtgcaatcctactgtaggatcagaatgaggaaaaccagaaatacttgataaatggccacaataactgccacatcttaagagccatcttttcttatgtgttattctattttgcactgctgtaaaagaacacctgagactgggtaacttataaagaaaaggagtttatttggctcatagttctgcaggctgtacaagtatggcagcagcatctgttcaacttctggtgagggttcaggaatcttttattcatgatggaagtcgatgaggggagcaagtgtgtcacatggtgagaaaggaagcaagaaagaggagggaggtcccagactcttttttaacaaccacatcttgtgtgaactcatgaccgtagggagggcacaaacccatttgtggaggttctgcccccgtgaccccaacacctcccaccaggctctaccttaaacactgaggatgacatttcaacatgagatttggaggggggcaaacctccaaatcatatcacctcgatgaacactgtttctctaaaaatgcacgctttgctcttacacatcccccacccctctttctctctcactgcttaaaattatcccaacaaacatctctggattggatgaaggctgtagtttcagaaacgctgagttcaactgctagagggatcgtagagaatatttgatccctcctctcactttacacataaaatagatgacagaaatgtgatctggctatgttaaattgtacctaattgcacaaactgagttaatgtcaaaggtgagcactgattctgaatcagcatctattctgttacatggtagagtgtcctttgggatactatagcaataactgcagtttttgaagaacttcaattggaatttcaataattttctacatacaaagcaaaatacttacaacttttgtttttgataatgtgctggatatgtctatattcttgacacttagaaaccctctttgatataagttcataggtttgggacacttgaatttcactaacaattatattcccagtgccaaaagtaatatctggcacatagaaagtgttgaattaatatttgttaggtttctttatttcttctttgcatattcatttatccactcttgctagtgagttcaagagagttctgttttattcatttatgcagaatcagtctttagcaaaatgcttaggtgatagcacttagttaacttttgggatgagtgcataaataaaaggaatagtaagctatcattagttttaactaattatgaagtctacaagggaaatctgaattactagacaggctgaactataatacatttttcaaagaaatctgattttgtttaagttcatataaatgataagaaagctagcaatgtcagtcaaaagattcttcttgaaatgtttacctcacgtgaaatttacctgcacatttgtgaaatgaagtgaaattctcacagatcattcactaaatctgttttttttccttattgtcattagcaaagtgtaaaaaactaattatgaagtctacaagggaaaactgaattactagaaaggctgaactataatacatttttcaaagaaatctgatttcgtttaagtttatataaatgataggaaagctagcaatgtcagtcaaaagattctccttgaaatgtataccttacatgtaaaaattaagctgctcatttgtgaaatgaagtgaaattctcatagatcattcaataaatctgttttttttcttattagcattagcaaagttttaaacgacctgccatcagtcccattttagatgtgtttaaacaatttgggacacttagccaggctgaccatgagctagcaagtatgcaggtggacttgatttgaatttattgtaattatcttattcacatttatctttaagctgttgatttgtatgtgcttaaatgtggtatatttaaatatttatcctgattcttttatcagcatgtcttactttcaaagtgcataaactgctcatttctttttcagcaaaacattcagcctccacgtcaaagatctcaggtgttgtattgaccaatatacaaaagattaaaatatagtgtaagtgcaaaccccaaggcaaacactcccttcagttgagtctcttctagcccccacctcattttccttagtgttcctttgacatccagcagattaatggaaaacctctgattgtgttccctgactagactcatccctctggggatgtgttggtttaatgttataacataccgagatttgtgtgtatgtggtggggctggggggaggaacagattattttgtactttttatttcccagttgaagaaagttaaaaatcaaaagagctgatctaaacggcacaatgagtttggcttccatgggactgcctggagcaaacagcactgttagcatcgataaccgaaatgtgacaagctcctcatccacttcctttggagaagcagacctcagcattctgatatatcctaggaacagctatctctacattatattaaagagaaatgaatatttttactaactattacatgacaatccctgaaaaacaatctatgttagacactacatgaccaaacttcatgaaagcatgtaaatgttctgttttctctatcttacctcccatctccataaacagtccttattctctttctcagcggactttgccgtcagtcaagctgatttctattattttaccctcccatttcactcctcctccaagacacacacacaagcacagagacacacacatacacatacaagcacacacacacacacacacacacgttgtctgtacttatttttttaaaaaaaagcaaaataaaaaatcttgctttcttcagtaaggattctcatctattcagaaatgtaaaatagtaagtccttttagagggcaagagagattgtctatagcacagcatggtatttttcttgttactcatataggaactggtaccctgccctgtgtcaaattttgtcccatgcttgaattaacatattcattcatttagtcaacaaatatttattgaatgactacaatgtgcctgacattttgcaaaagatgagcctaacatttaataatgattcaccaattcatgatttgtttgaccaaaaaacattcatgtcattatcagtaaagatttcttgcatggtgatggccacaaagcattatcacaggtagtattgggaggaggaggcaatgtttatgacattaagaaaagacagctagctctcttggacctctgcaattaatagaagaaatactagtatcataaaaataaagcttcaaggtctacctttgtaactggacacttatatacttattcccggcctgagagtaatatattacagattcaaaggtgtctgaacagtaaataaattaaaacatcacacgaaagagaagtaataggaagtgagagttggaatggatctagaagttataaggtttaaaattctcatttcatgtatgataaaactaaagagcacacagagtacagacaattttccacatcttggtaggtctttcccacttcggagcatgcaatcatggcttctctttgttgatgtaagagttggttttggtggtgaaggcttggtgagtcagggcttgctgggttggacatgacgtttgaatacacagttaaagaactcatctaataacatgcagctgcaactgcaaatgactgtggtggggatatataaaaaagtagaattaatgaaccaagatagagtaattctgtccctcattcaataattgatatacgaaaagacattttcttatgtgaaacttaaaatagtatgaccaaacggatcccctaggtaccgttaagtgcaaaaaatggctatcagcagaatccagaatattttcaggttaactagaccctctaacttctcttttgaattggttttcctcatttttaattatctgataatcatacttgaaaaccgcttcggtctgaattacttaaataatttaggtaaaggatgggtttccttagcctgaattatctaaataatctatgttggctggaaccatctgataaatgccaatcctggacttccctttccctggtgcagatgtggcctcagaaaattaatctgaacactattttaaattttacacgaagagcatcatgtccatatgaatgccctttaggtgcagaagaaaggaattctgtgtatgggttaaatgagattattcaaagtaatcaatggctaatttgaagagaaagagaagagggagcatgatttctgggctctttgtgcatttgatcattttggtaagtattccagttgagaatggtaccttctcaaactgcctcaagcttcagagaagtaaatgtcattggcccatatttgggctgcacacagaagggtctctcatgtgaatgacattttctactgaggatcctgtttcatgtcttagcagatattggttcaccttcctcaggggaatagatacatctagatccttccccttagaagttgagctttatatctaaagcctatagcttttttgtggtctcatacagtattgtctccgcaaaataaatacaaaggcatagatcgatagattacttagacagataggtagatagatagatagatagatagatagatagatagattacaagtttttgtagtaaaaaatggaaagcctatgtacaagccatgggagattgtttgcaaattcaaaaaaaaaaaaagaaaagactgcttagtttgcccttttctaccaccttgcctttaatgtggtggataattttttttttttttttttgagacagagtctcgctctgttgcccaggctggagtgcagcagtgccatctcagcttactgcaacgtctgcctcccgggctcaagctgttctcctgcctcggcctgccgagtagctgggattacaggtgcatgccaccacgcccagctaattttttgtatttttagtagagacagggtttcaccatgttggccaggttagacttgaactcctaagctcaagtaatctgccctcctcagcttcccaaagtgttgagattacaggcatgagccaccacacctggccaggttaactaatatttctaaaatgaaaaagagtatctgctttcaacaaatatatataatataaatgtataattacctatattatatatagttcatctattattatacttaaagatatatccctcttacaaaaagaaaattcctatgaaataaactatatggggcactcatgtcacttagggtctatgataaatttgcttctctgcttcataaaatatgactttggtgctagggccttttgtctttcagagtgggatttgtagtctatcaccatgagaaacaaccggatcttctaaataagcaagttcctaggctccggccagacctaccaagtaggaagtactggggataagtctcagcaatttgcatttttcataaaaacacaatgattgttaggcacacttaagtatgaaatctaaagatatttttttcttattcctgctctgccaagtgtcttggacaagtcacaccaactttctgtgtcctatgatttggtgaataaaataagttggtcttagagatggagactcagtctgaatttaaatctgacaattgctagctgtgagcctttgagaagagcatgtgaacaaacttagccgtgtctgcatcatttataaaatggaaatattaacgtgtttagcttaacacgcacatgttgtgaagataaaattagataataggagtgagtaaaacttgtaaaccttaagaacaatagagacgagaacatttttctttgctgtaaaatagaagataaagacttcccaggtgtgatatgagggcaaatacaattatttagaaagtgttttgcttcttttttttttaagttaggtgtttctaaaaagagaatatgtcttgggtgagttacttttaatctttttaaggtgtattattttacatctgaaaatggtaatttataaaggggttcagaattctcaaatgacaaatattataaatattctatgtttcccttatatttatatccataattactaagtgcataacagaaaaaattaactagtcatctgttaacaacactgaggtttttatgcagagtgaaatgagggacaacctaatgttattataattaacgacagcctctgccagttaaatgataaatctatttgcacattattctaccctcttcctgcctgagcctggcacagggctgtgggattatggcttcatttttcagaatgagatccaactcagcaactaattctaatgttctctggaactaaaaatgattttcctttgtactgtcctagggataaaacctgattaggtaaatattcctccaagtgtattgtttataccatgaacgtgagtcttgattcgcaaaagatcttttctctcaaagttactgcctgtgcaacagaatcccaaagatgagctgggaagctcagaagatacaaattgacatgtttgctaccttgacattctccacagggcctctaatcctgtacctgtcaccgatgcaaatggtgaaggatctcagggcaacaagaaaatttaggataagaaaaatctcaggtcgtagctcagaattcatctcagatactaaccgtggttggggaatgaaatggcattaggaatgcgaaagttattagtaccacatttgtctcttactttgtgttcaaaaaataattagtttatttctctttccctaaattcccttttaattccgctctcaaccccatcccttctttttaagtttttcatttatttatttattttcccagctttattgaagtatagttgacaaataaaaattatttgtcattatgctgtacattcaacatgtacagcataattatgtgatatacattgtgagtatttgatatatgtatacattgtaaaatgattatcacaatcaaattgattagcacttccatcaccacacagtcactgtgtgtatgtctgtgcatgtgtgtgtgtgtttgtgtgtgtagtgaggtcatttaagatttattctcttcccaaacttaagtaaacaacacattattactagtcactgtttactttttacattgtgttccctcttttcaatgctctgtgccctcacgtatgcaaaaaaaaattgtcctgcattcttgctacaagcatgtatttactaggaaaacagtgactttcattcactatagatgtaaatgacttctagcaaatcttctttgtagggaagaactttcagggcatttagcaggtgaagagacatgacaaccttactcagaaaggtgacttgaaaagaaatacaaacaaaatctcctaggcaccttttctgcaggaagagcctatttttgaaggttatccctaagtgattgtgaggtcattaactcaaatgcacttggatctatattttttgatccaacattgtcattgcctttggctcactccatgcagaagtatcaccccaatgatattgtccaagttaatttaccctataaaaaattaggatagctgcccatttctggtgaacagtgagttttccacttcctaatgggaaaccacccacagagaattggctgctcatttcaacaaacgagagggaacacactgatttcttaactcatcccaggacacaagataaatccatgaatcaaagatcagtgtagtgcttgattcagccaccaaatgtcactatattctcagtgtcatacagtgatgacacttggatttctgcccatcaaactccagccaagagataattgctcatactcatgcctaggcatgaagtacacactggcttcctgctggaaaccatactcagaaagtgagttaacaattctgatcttcccaatcttggggttctgatgtagctttgatttttattttcatttgactgtgaaaatttttcgctccttatgtctttggaataagaatctgtgacataatttattagaagccatctatagagatacccatagactgttgggtagacaagaacaatgcgtgcaaacgacaggcacaccactgggctgcagtatgctgttttcactgtttctttttaatttattgctactaggacttttgaaaaatatactattaattgcatgcctgaaataaaattaacttggctggacttgccctaactaaaattttggaaaagtttatcttatgttgaaaaatagtttaagcaaagcacacctgaaggaaaagggggagggagaatatctctaaaaattaaatgtcttcattagtagaagttagagatagctcattcatcttttagtatgctataatctgacctcataaaatgaaagaaagaaatagtctagtgagaggttacccagctccagtggttattaagtataaacacaataaaagcaagcaagagaattttaaaacacattatgttttataattgtttgtaatagtaacaaaataaagatgacacaattcttggatgtttgaacttttattaattgtaatatttcatagtgcttggagttgttctgttgctgttgctgttttcctaataaaagtttgaaatctctaatttatttccttaaatgccaaattttgcaaaaaggtcaatgaacccatcatagttcccccatgagaaatgtatgtattcctcagaaatgaatttcacttaaaactttctggttataaccacaattatttctgactgttcttggaaataatttaataaactgggctttacaaaagtgagatttagaaaaatgaaaacagaccgggcgtggtggctcacgcctgtaatcccagcactttgggaggccaaggcgggcagatcacaaggtcaggagatccagaccatcttggccaacatggtgaaaccgcatctctactaaaatacaaaaaattagctgggtgtggtggcgcgtgcctgtaatcctggctacttgggaggctgaggcaggagggtcacttgaacccaggaggaggaggtcgcagtgagctgagatcgtgccactgcactccagcctggtgacagagcaagactccatctaaaaaaaaacagggtaaaattaacagagtgtaaaataggttggctaatttatccataagagaaagggagagtggatcatcgatttgaaagttataacaaatgagataaatatggaaattataatttaaactacagtgaggaaacagattctagaacccatggcctgtggctatgatggaccacaattaggaggatagcagcatagatctgagaggtagactgggttcactgccctgaagtaattctgttgaactgtgtgtgctcacagtgttgcacctcagaaagatcttgttcctgctaaagagaacagcactggttagaaaaaaatgcactgtacatcttacagcgtgtacaatgggcatcttcgcatttttatgaagctgatgatagggatggcttcaagtgagacatcaagtggagatgggtttgtgataggcgggattttacgagtttggaaggcaattatcattacagaattctacaaacgtaacaaagaatccattactttttgtcccgtctgaacatttaacagctctaacatttttgcaattatagcaaggccttatcatgactcttatgtcctggctatttaccaaggctccaacttcatccaaggtcactttctgcctttcctacggcactgtggctaccctggtcttgttttagttcttctttactccaagctgttttcctaaatctagtctcacatttttcctcagataaaaacaccaatttccttccttttctttcctttcctttcctttcctttccccttcgttcctccctcccttccttccttccttcttcctctctttctctccttttctttttttcctgctttctttcttttttgctctctttctttcccccttacaattagtcctttctcgcctcccggtctcacccatcatgtcacctccctgccttcctcattgaaaataggtttcctcaccataccctctggtattatcttcctcaatatccctttttttcctaagtactatttaaatgagagtttatgagaggttatatttgcatatatttattgtgtatttttcatctctttctttcattagaatgtagttgccatgagaagcagaattataaccatttgttcaaggttgaattatcagtatatagtagaaattgaatactactaatgatttttggggaaaaaaaacacaaccattgaattgaacagctataatgagaaccaagtcaatacaacatgctacatctctgtgctattctagtgacctcataggagaccatggctacctgggaagtgtagtgctagcgaaaaagcaaacctttattttcccattaggtcagggaataaaacacatttggaaaacaaaacaactgaactgcaactagagaatgttctattaactactagaaagtataatagaagaaagttagaaagattgataataatataaaagagtggaggacataaaaataatttcttttagcaaaattagcttcatggaaagaactttactcctcttggatttttctggaattaatctgtaattcttacttacatcaaataggatataactgactcagggttatgtatcttttaggaaacatccatgtctgattagcatgaaggttatgaggagaacgtgatcacagccaaggtagtcttctcaaaaaggtgagtcttcacagattctaagtttgttttaaattcactgctacatttctctgacaatattatgtaagagcatttttttaaaaaaacaatgatcatgtgatctcattattcaattcccacctatgagtgagaatatgcagtgtttggttttttgttcttgtgatagtttactgagaatgatgatttacaatttcatccatgtccctacaaaggacatgaactcatcattttttatggctgcatagtattccatggtgtatatgtgccacattttcttaatccagtctatcattgttggacatttgggttggttccaagtctttgctattgtgaatagtgccgcaataaacatacgtgtgcatgtgtctttatagcagcaagatttatagtcctttgggtatatacccagtaatgggatggctgggtcaaatggtatttctagttctagatccctgaggaatcgccacactgacttccacagtggttgaactagtttacggtcccaccaacagtgtaaaagtgttcctatttctccacatcctctccagcacctgttgtttcctgactttttaatgattgccattctaactggtgtgagatggtatctcattgtggttttgatttgcatttctctgatggccagtgatgatgagcattttttcatgtgttttttggctgcataaatgtcttcttttgagaagtgtctgttcatgtccttcacccactttttgatggggttgtttgtttttttcttgtaaatttgtttgagttcattgtagattctggatattagccctttgttgagatcacatggacacaggaaggggaatatcacactctggggactgtggtggggtggggggaggggggagggatagcattgggagatatacctaatgctagatgacgagttagtgggtgcagcgcaccagcatggcacatgtatacatatgtaactaacctgcacaatgtgcacatgtaccctaaaacttaaagtacaataaaaaacagaaaaaaaaaaaaaaaaaacaatgatcaatttaagaaaaaaaaaaaagcaattttgggagcttggacatgaaacattctattcctctaataccagaatatgagaaaacaatttgctttctttgctctcagataatgaaaaaatatatttggggagaaaaaagtaaaatgggttgtttggtaccatgatgatagaactgttgatttgctaaatatttgattctttaaaatacgccttagtgctctcaaaaaggtggagtctggtttattagggacatgttatgcatttcacaagaaaacagaactcttccaataaaacgtctcctgagatcagatgtcattgttcttattaaatgtactggcccaatgtatcagccgtgagctttaaaaaattagaaaatgaaggccaggagcagtggctcacgcctgtaatcccagcactttgggaggccgagacagcggatcacttgaggtcaagagttcaagatcagcctggccaacatggtgaaacccagcctctactgaaaatacaaaaattagccaggtgtggtggtggacgcctgaagtcccagctacttggaaggccgaggcaggataattgcttgaacctgggaggcggaggttgcagtgagctgagaccacaccactgcactccagcctgggcaacagagtgagacttttgtctcaaaataaataaataaataagcagaaaataaagacattttgagggtgcacattagagagtttctatttgtcagaactgcccatagatcattttaataggtaaaaccaaggcaagtactacacatatttgttcactgcaatttctgcagaatcagtggaatacatattgctttctctatgaagagacaaacatggttttcctctccaataccttcatttccttttcttagttttcatatttgaatgagtgtgtatgtgtatgtgtaaaaaaatgatgtatacactcccactcatattggaaagaatagaatacagattccttatttctccataaacgaatctcagaaaaacttaaatttcctataaactcattgtaggggagaatggatttgtaggaacccatctcaaagggtgtcccatcattccccttcccaatgcaggtctactttaggtgcgtagagatacctatctatctccattgatttgggaaaatggcccccagtctacctgctctgctcttgcttggttcagataaattccagaagagtaatggctcagctgaactctgagctgtggtttcacatcttgccttatatgttgctgaatcttgaggctcgtggacttatcactcatggactattcatagtatagcggttctctttccccagtaacttgactccattgttacttcagaacttctcagtctcagaaatgccacccttcaggccctaacatagaccatccatgttaaggcatccgtaccaactctacctattccctcaccataatggctccagcccctccacaagtttggccctcatgcctcagctcttcctctggaggcatctcagtacttctggacccctctcccactctgtgtaggcttgatgcctctcgtgactactctcttcttagacaaagcaatctgatctctcgctccccaaatgcaaatgcctgttagcaattccttttcagagggaataactttcagggtatttagcagaaaaaatgcatcacaacatgatttttaaaagcagacctcagaaacaacgcaaataaaactttctaagtacctttttagaaagaacagaatttttaaaaaattatctataagtgattgaaaggccactaactaaagcatacctgatacatattttttgatccaacactggcatttatcttattaggtacaaaattctttggaatattgagattctgatattgctgttgacatagtcaggatatgaaaactgtttttgccatggggaaaaacaagtcactttgaagtcaacttgaaactgaacagtgattgcattattctgggctgaatgtaccctatttttacctggggtgataaatttcatggccaagttgtcacggtagaatgagtaaaaagaaagaaatggacttaccagaaagaagaggtacccgggggaagtatttttaaaatagatttttggtatcatatatcatgcttaaattggatagaatggaagtattctattcaacatgattagtctaattgatcaattaataagaaaaatcatttaagtcatataaatcatgaaatgttttataaagatacactatttaagctgtcgttcattttccaatattttgaagtaggactaaatttatttcaatgagtttgctgattaaagagctatgttcctttccttgtataaactatactcataatgtattgtcatttatttccccgttgtttttttttaagtgaaatgagaactcagacatatttgtgaaacaatgcaagattacagtcctcagagatctttattctcactcccaatcttttttattcttctttttctgcacataattcaagaatattttttgtaacttgcctttattagtattttgaaaccattaaacatagttttcataggaaccgctctctttccatgctcatattccattagcttatataaataatgaaggaagtaataaaaagtacacttagaaaaaaaacagatctgggaagaaaaatgattcttgataagtatacagcttatctgggggtagcagaaatgtgagaatactagaatataattaagtagccttgggcattccttagatgatcaacatagtgttatgttttataatgaaaagtataattcttagttaatccaatgggttatttaagtggggaccagttaaaagagattctactgtatttacacacttatttttgtcatagtaattactatcatgaatatatcgcatatttctttcctgttttctttcagcgcaactagattcatcagcttttggagcaccttcttgtgggcacatactctgctatgtattgagaatatcatgttgaataaggtctggtccctgaatgcaaaaagggtccaaaaagggataacacacaccatcaatattttctatgcttagaattccataaagacaaaaatttaaaatatatggcttcaactattagaaatagttccctatctcacttacttttatatatttttttgcagtattttatgtaatattttctgcataattttgaccaagttttaaaaccataaaaatagctggataaaatgtgtgcccttatcactgattgtcaatctatatcagttacaattttttcttattgttcttcactccagtgtgaagagttaagttgaaatatctctcaatcccctgagatttctgattcatatatgtggctctgaaatactgtgataactttacaccagcagagcgtccaatgctattgcagatggttttcacttatgaactactgtatgcaacatgccttattcataacctctccattaacatggaaaatgagtagataggtgacattatctgaccttacagcatttctggtcaatattaggccagtattattttctgactttccttaattttttcaaaatttatgacaaaccaaaaatgaaataattatttagtggttaaaatggtccaaatattttttaaagaagactgtattcttaagtctttgaaactaggacaaattttatttgaagtttcaaaattataaaagctttcagtattatacatttcttcagtggttcccttaacaataaatttatgatgtttttcagtcactttttaagctctttttagtttcaattaagacttggtagaacatattttttaactcatatatggagaatgtaaactttaaatagagatgtaaatcactttctttagaattttttttctacttatctttagcatgttttattcattttaaaatgtctaccccaatgcctgacactaatttggcactcagaaaagtttattaaatttatatatttgtactgaaataccataacttcataggcaaagcttctcttgttttaaataatttttaacattttttttattttttaaaaaaagataacagaaaaattaaaaaaaagaagtgtaacgctaatagtgagctctagagcaattatccagtccaccttctccaattttcagatgaaactgagagctgaataaattaagtgatttgaccaatggcaaattaatctgacttcaaactcttaaatgaattactaatccatgtagcttatttggttctaaattttgatttaaccaacaagaattagaactgagcaattataaaggcactataataagtgctgctctaaaaaaaaaagaaagaaagaaggaggccaggcacagttgcttatgcctataatcccagcactttgggaggccgaggcaggtagattacttgaacccaggagtttgagaccagcctgggcaacatggtgaaaccctgtttctaaaaaaaaatcagaaaagagtagccaggcatggtggtgcatgcctgtagtcccagctactcaggaggtagagaggggaggattgcttaagcccaggaggttgaggctgcagtgagcagtgattatggcactacactccagcctgggcgacagagagaagaagcaggaggagaagaaggaggatgagaagaagagggagagggaggggagggggaggaggagggagaggggagcggaggggaggcgaaggagtgagggagagaaagtttcctacccaggaaactttgagtagtatttggaaaggactaaaatttgattctcaagatcaagactggagtctgggctggaaatactggtttgagtcattagcatccaatcattataactaaaaaacatgtagtgaatgaaatcacacaaagaaagggaataaaacaaaagaaataatagaactaaggatagagtcctgatggaatcatgctcttggtggagacgtgtatgagttcactttctgttatttataaaagaataccaaaaactaggtaatttataaagcaaagagacttattcttacaattatggaggctaagcccaggttgagggctggatctgtgagagccttcttactggtgtagactctccaaggagtcctgaggtgatgcaggctatcaggtgagcgggcttggcagactcacacactagctcagatctcttcttcttcttataaagccattagttcccctcccatgacaatgcattaatccattactctatgaagggattaatcaattcatgagggcagagtcctcatgatccagttacttttcataatcccatctctcaatacttgcgcattgggattaagtttcaacaggagttttgaaggggacattcaaatcatagcaagacatataggatgaaaatcaagaaatgtatattttttaaatcttgacggggggcacaagataatcaagtaatgagtaatggatggttttatatacactacagagacccagttagagtggagaattaaaagacattatttaaataaaaaattcagaatcactggagattcttgcaaaagtgcttttgctactaagggagtagcatattaaagggtcaaagtgcagattcaaaagattttgaaaaaaataaaagagaagggaaggaagataaaaatcaaagaccaatattttccagtttttcctgctaccttcacaggtgctaatagctattacttgaaaaactatacaggaaaatgttgggacatagtcccacagtgaaataacttgggaagacaatttaacattatttttactgcaagacttctcagaaaatttgtttggcaagtaagaacaaaaaatatccacaagagtgtgtaattggtcatctagtttttaataaatgaacatatttggggattaatattctacaatagttacttgggaaattttgttttgaaagtttaagaaagccaaggtatttgacactacacagaaagaaaggaaaggaaagaaaaaagaaggagatcagtcatggtggctaacacctgtaatcccagcactttgggaggcctcagtgggtggatctcttgagctcttgatgtcaggagtttgagactagcctggccaacatggtgaaaccccatctctgctaaaaatacaaaaattagccaggtatggtggcacatgcctgtaatcccagctactcgggaggccgaggcacaagaattgcttgaacctaggaggcagcagaggttgcagtgagttgagattgcaccactgcacgtcagcctaggtgacagagcaagactctgtctcaaaacaaacaaaagaaagaaagaaagaagaaagaaagaaagaaagaaagaaagaaagaaagaaagaagaaataatttgatagcttgaagaaaaactttgtatgagttgaggcgtgaattctttctagcactgaataggtttaaccagattcgaagtattaacatttcaatagttttgtaggggaggaaaacgaatattttccttatacacttctaggatctcagttgaggcctataagaaaagacagattaactaaaaaaaaaacaaaaacaaacaaacaaacaaaaaaagcattttattttctttttttttaagttttgaaatggagtctctttctgtctcccaggctggagtacagaggtacaatctcagcttattgcaacctctgcctcccaggctcaaacaatcctcttacctcagcctcccaagtatctgagacaacagatatgcaccaccacacccaactaacttttgtattttttgtagagatggggtttcaccatgttgcccaggctggtcttgaactcctgggatcaagtgatccacccaccttggcttccccaagtgctggaattacaggcgtgcaccaccacacctggtgcatttgctcactataagtctaatgtgacatgggatactccaaaatgaaatgaagatcccaaagaaaaaatggttaaacctgactatttttatactaggtttgatgaagagtacaaagttatgaaaaaatatggtaggattaggaggtatgagataagactggtaaactggggttgacttatcaaggcttgttcatttagatacctctcatcctctctctcttcatcttcagagataaggatgctgctttctcccaggtacaggaagggcacctctcatacaaaagtcttatgatttcttcagggaaaagtcagagtcattcccacacttactctttctcaaattctttcagcttaaaacattcaatatatcaaggcaccatattttggggtagtatgttctgaaccctatgatatctccatctgaaacttttccccaaagcttttacagcccagaaagtgagctggcagattgtcccatacgtcactgaaccagtctctcagtcctgggattagattcctctgcttaaagagctgtgtcttatttctggactcagtagtataggcagaagtaggttgcctacccaagttaaacctccatgaggtgtgagcaataaggcatttaagtaggggtatttctatgaaaacacaaataaaaaaaggttaattgttaaaacaagctataaactcagtttttgaatccagaatgcaatttaaaaatttctagatattgagctgaaagtatcctgagatggtggagtgacagtaacagtggacatccaacatatttttgggtttgcagtttgaatgcctctagtgatggcactgtgtcttagcctgtttgtgttgctgtaaaagaatacctgaagctggataacttacaaagaaagaaggcttatttggctcacagttctgtaggctgtacaagaagcatggcaccagcatctgcttttagtgaaggcttcagggaacttccgcccattggaaggcaaaggacagcaggcatgtcaaatgacaagagagaaggaaaagagagaggggaagaaggtgccatgctcttttaaataataagttcttatgggaacaaatagagcaagagcttgctcattaccacaagaacagcagcaaaccatccatgaggggtctgcccacatgatgcaaacaccttccattaagtcccacctccaacattgtggatgaaatttcaacatgagatttggagggtagaaatctccaaactgtaccacaccattatgtttattctcagaacaaagtatggaagtgcccagtttcagcttgcaaggcttctttaggtattccaaataaggatgtgagcaatcaggctttagctctcagaggtgccaaatcaggggggtaaaagaaaaatgtaaaatgtggaagagttgtaaccacattttcaaggaagcgaactaattgagcaggatccatccagtttacagtagataacaaaacttcaaatccaatgaacagggggaatggaattgtataattcagatgatgtgacattgtttgccattgaaacataatttttgtctctatagtcacctccatttctatcaaagataatcaaagtaggactaattcgtttgcaaactaagtctttttttgtttatactttaagtataataagccacatgaacttgaaaagcatttgggttagtttttatatttctgagacttttaggagtactaaatgtggagtcctgagaagataagtaagcagcaaccaggaagaggtcccagatggaggagaacaattgttctgagaaacggctaatcacacacaacccactggtatgacatcctattcccaaatacctcattctgcacacagccccagcagcaagaccttatctgcatactttatctgcatatagaccctccagtacaacctacctagtacttcccttcagtccctgcctcttggcagacagccctttctctgctgtgctgcccattgcactcttgcaacgtatctcctgtcttttctaataaatctgcctttcttcgcccatgactgtcttggtaaattattttactgcccatgacaccagtcccaaccagatgtacctgtgacaatttatataagtgtgcatttatctcaaagccaatttgaatataatttcttttgaaaattttataaatgactatggtagaaattaattaatttctaaaattaattttcaaccattcagggatagaaagtattacacataacatacatacactcataaatatacagacagatgccaatagagattttatagctttcattgtaaattttagccataaatgaggtatagatacagaaacacaaaatttgcttatttatataagagttgattctcatctttgtcttattacatttctagcagttggagcaaataagtcaagattacttgctcaatggaagctaaagcttttttagcaatatttgtgaaaaagacttttaagaatttcatatgagcttgataagtaattttatggaagctgtggactacatttggggtgagggatgctgtgaaaatatcaactagcagtttatttccaaaatgtctcccttgtttctccatctgagttgaatgcaagagttacctttttgaaagtttgcatttccaaagagatggtaagatttatatctccaagtgaaagagaaatgatgtaggttttctccaagaaggaattaagaaacatatttgcttattatagtgtcagaaatctagggtaattataatataagatttttctggctcacgcctgtaatcccagcactttgggaggccgaggcaggcggatcacaaggtcaggagatcaaaaccatcctggctaacacagtgaaaccccgtctctactaaaaatacaaaaacattagccgggcatggtggcgggcgcctgtagtcccagctactcgggaggctgaggcaggagaatggcgggaacctgggaggcggagcttgcagtgagccgagatcgcgccactgcactccaacctggggaacaaagcaagactctgtctcagaaaaaaaaaaaagatttttcccctcattaagtacatttttatgattggggtccaaaatacatttacaaagtaatttgaatgggaaggcctagagctgaaaaagtttgattatagagtctcatgaaataagtggactttataagggactgtaaaacagccttgctgggttccctggggcctttttcaaagctatttgctggctatcccttttaacctaagtctcagcctttctgagtgccttttgcaattcataacttttgttctaagtctgagctctacctcctaatctttttaagggagttttttggtgttttcatgtgtttttctcagaccagttaagaaattgtttctttttcatttttcctttctttcaatttgatatttctatagacacttaagggacatttgtttagaatgggagccctcaagaaagaaaaatcctttggatgtacaagtccaaatcttcaaagtatacctattccaattgtgaatcaaattcaagcccaattaaccctttaaagaatgtttaccttttgccaactttgttaaagtttccagatttcttttcttttcttttctttttgagttttgctctgtgtcacccaggctggagtgcagtggtgtgatctctgctcactgcagcctctgcctcctgggttcaagtgattctcctgtcttagccttccgagtagcttggactacaggcatgtaccccacacccagctaattttgtgtttttagtagagctggggtttcaccatgttggtcaagctgttcttgaactcctgacctcaggtgatcctcctgcctccacctcccaaagtgctgggattgtaggtgtgagccacggcgcctgggcaagtttccagatttcagctgcagcttctggactgagaaagatgtcctggacaatggtatctcatccttattaccagaaactgtagggagaaaaaatattttccttcaacccttctcggttctcttctgggaactgtaataaaagatgagttaatgaaaaaaaagggtacaaatttatttaatataggttttatgtagcactggagcttcataaagaaatgaagacccaaataaacagctaaacctgaatgtttttatactaggtttgaaaaacaaagtagtaaaaccaccttttcacaaattatatcagtgagaaaattatggcaatgggggagatctgatctggtcaatcctcatcttgcctttggccttcaaaatacccttaattatttctgagattaagccaagcaaactaatgagagacatttagtttgtagtataaatgataacagccgttccccaaaacttaactgcctttgtaaagctaatgagagacctccaggctaggtgaatagaggagcctgaattccgctgaggtatagacataaacaattgctagtcattattttgtaggtcacaagataggcaatttccctaattactcaagcagataacattactattgtagaatttaagattggccttttgaaacagcttttcaggttttttttttttttttttttttgcaaatccttctaccaatcgctccacctgcacctgccaactgctcctaagtggcccactccagaagccactcaatgcacaagaagaccacttcccacctgcacccctgccccttcccccaaactacctttgaaacctagcctccaaatggttggagaggctgatttgagtaataataaaactccagccttctatttggtctactcaatgtgtgcaaaattctttctctgttggaattctcctgccttgataaattggctctatctgggcaatgggcaatgaaaaaccctttgggcagttacagtagaaagccatgaaaaaatgtgattggacaaagttgtaggagccatgagtcgtgagctaggggaacagcctctgtcttaaagataaggaggacacttctcaaatgagggtcttccaacttgctccatgggaaggtgaaaaggtccttactgcacctcttgtttctcaaattccttcagcttcaaacattcaatatgccaaagcaccatattttgggtgaagcatgttctgaaccctatcaattttaactcagtctaaataaagcacttctgaagccatgcatacagtcaaatactgtcagggccatgccacagaatttctattgattttcattttcctcaccaaaacatcaaggaaagatgcaacaaagggaaaatctaacaggcagtcttaagttagatgtaattgctaaggctgattaagagaagagaaaacatggagaaaaaaaatcttagtaaatactcttgccagttttatactgttgctcattttctggcattccaaaatctcttttgcagatttttgtgtaaacattgttaaaaggatccattggttaacaaagaaaattttgttttgtaattttaattttgttttattattttagaatttagaagtattttgttttatttgctaaacatattttttcctgtatcaagtgattgctgctgggaaagatcttccatctcttttccctgtctctggaacatggttttctctgtggcttggcatattagaactgtcccttttaggcaaaccttgaataagccttctcctcaaataatttgacagaaacaaaatggtgttgtcacctaaaatctcacctgtactatattgactgtgcgtgagactgtaggtctcagaatcatttctgaagaagcccctatgtatttacctcagaaatgtaaccatattatggtatctaagatcatttagttagtttattaggtaagccttagttctcaatagagaacaaagtgttattgatagagacaggaggcaggaaaattctgggcagaagagggcagttccctggtgaggacgccatgctcaagtctggaaccgcagcccaaagtgagaacaggcattcttgttttcctgcttgaacgctgacttttctaaaaccacccgtggcccaccccacccccaagcctgtaaccgtaaaatccccaggctccaccagcaaagaaagagaggcagagaagaggagaagctgctagacgtcagaaactacagtttgacgtcagagacaagcagcttgacttcagagggttggcttgccggtgttgctttggagaggagtccagccgcggacagctggatgctgggagaagatcaccttccttcttccttccctctccagctccccttcccgctgagagtcattttcatcagcaataaaatcttccacattgacaacccttcaattcttttgtgtgaccttattttttcctggacacccaataagagctcagtgtcacaggtatggacactaaaggctgttatcctgaccctctgccctcactggtggagaaccaccacctcacgtgaaaagccagagggcccactgagttgtctaacacctaagctgttgtggatggcaaaactaaaagagcactgtaacacatgccctctgggggctttgaggattgtggatactccctgctagacactgccacaggccttacatggaatttttgcacctgccgtgcccaaaggcacttgccctggatcctgcaccctctcacctaaatgctccctcctgcaaggagttgaacacaatggattcaagtaagtggagtttgaccctgctggcaccaaagcagtgggctagccccattgccctcactccagttcccatctgtgaaggagtcaggggaaatttcctgctttattaaaaaaatggaacctacaatgaataaattttgttttattcatcaaacacagaactcggaagaaaaatagaagtcaacgaattcagtgattaacaaaatgaatttagaagaatctcccttttggtgccattgttgggaaagagagacaagctgaatcagtaggggtcctggcttcttgaattttttttttttcacctttgtgtttctgtaggtttctttttacattttgtttttctttattacatgaaaaagtacttaaaataatgatttaatctaaatattttatattaaacaagtagaaatcatgtttctaaggaagtaaattattttacgaagtcataactctaatacaagacataattggaactagtaccagggtttcttgagttttagtgcaccatgttttttatttcacttttatattctgttgaagatctaagagctcaactggaatgccataaagaacatgaaggcttgacaaaaatagaaaaaatgaaagaaatgagctataaagaaggctgagatcattaatggttattattttctactgcatgttgccttcatgtaattattcatccacctatttgaatatattgtgcatgttgaataaagtgatggagatgtgatgattttgttcataatccctggagagttattaatctagaccaggttttgtcagactcagccccaatgaaatttggggctgaataatttgttgttgttgctgtcctttgcttcataaaatgttaagcaccatctcagccctcaacccactagataacagaagagatatcagtcatgacaatcaaaaatgtctccacataatgccagatatccttggggagtgacatcatcttagctgagaatcactaatcttgatgatgtaagatgtaaattagaactgagagacctgactgaaggtatctgaccatatgataattttcatttatggccatttgttccagggttttaaggaatacaatgagctattttaggaattctaagaattataattgggactgtaagaagtgaggaaagtgtgggttcatagtttaatgcaaagaggtaaagcaggctgaatgtgagttgactatatgcctagtcggtgtgatgagtcaagaaaaatgtttagtactgtaatttaatagaactcagctcttgctaatttctatatgtgaccctagaaatgttgggcagaaaataattaaatatttatctttgatggtttggcaagacatgttttatagtgaaaaatggaaaacctcatgaagaaaggactattttacagaacactgtagcattctatgtagcttctgtctcaagcctattcctttactacctaaaactagagaaattcatgaatcagtttcccattgttataataaaaatgttattttttggcttatttatttatttttagtcacattttactttatattgagtaaacacctgctattttcagtgtggaattgctcctctatcatgagcatagttgtggtgagtgtctcaaccacaatggctgatcacttcctgaaagaaaacatggctcaattttgtccaatcagattatgtttatgatatttttaatatttgttctatggacattggcatagagttctctattactttgtattttaacctttaaggattccgtaaggcagatggtagtatgcttgtctgtcttgtgtgcaggtgcagagagcctggccacacagcaagaaggaataaagtgaacaagcaaagaaatgcaaaggtaagaggactctgaaagaaaaaaagtctcgtgactttttcaagcacctagatctagccatatctgaagctagttttttcttgctatctggtaagatgagtcaacaaaattccatttttgcttcatctagtttgcactaggtttctatcacttgcagaggaaagagatctggtgattacagtgaatattctcattgagcaaatgtggacaagaaattagaaatgcaaagagacagcaaagtgacagatatacagataaaagacaaacaggtacaacaaggagggggcagaaatccccttgaattttaatgcaggaataatgaacaaataaagagggagtgtatgggttatcttgcaagtttgttcttcaaggacaaacaaggcatcagagaaaaatgacctcatagcagattgaaatagagacgataatggaggaggaaaatgtccagaatcaaaccgaagactttgtccttcttttcacctactgtttgcacattctttttttttttttttttttttttttgagatagagtcttgctctgtcaccaggctggagtgcagggacatgatctcggctcactgcaacctccgcctcccgggttcaagcgattctcctgcctcagcctcctgagtagctgggactacaggcacacaccaccatgcccagctaatttttgtatttttagcagagacagggtttcaccatgttggccaggatggtcttgatttcctgacctcatgatctgcccgcctcagcctcccaaggtgcttgggattatgggcatgagttactgtgcccagcccactctatctttctcttaacctcttagttttgcttgcttctaaattggcttcatcctcaggaaatgtcttttcatactatggcaaagaagactattgtcagcctggggttaacatcattacaagtcatgaatgcaatgacaagcgttacctctcttccctacatgagtctgattgactctgctgtagtcttaagtctacttctgaaccaatcattgtatctaagaggatgtgcttcagtcacgtccatgagctacatctgcatctaggtgctggaactcagactgtcagatccaacaagatcaggagaagtaagatggggagagttactcaaaggaaaaaaggccatgtaaccaacattatttactattattattttttgtcttcattaacattactgcaaatgtccttcaatctcctaacaaatactcagtggaacatgtatgttgttggtgacatctatgctaactgtcaaagagtaagtattggtatgaccactgttgggttaggatgaaaatcaagaggacacattagtgtagaattctgtgtaactatgtaggtaccttttaacaaaatgtacaaaggtctagatatgcataaatgccatctatgatttattgagcatttattatgtgccagtaattgtgttaactaaacactttaatttaattatcttatttaatcctcccaaacgtggtaaggaaaatattactgtccttcccaaattggaaataatgttcagtaaagtaatttataaaaacaagcaagtggcagagattggactgaaacacaggaagtgtaaaatcaaaacttgaatatttaatatgctttccacttagggtgacctatactttatcttcctatccttaaatggttattaacagcatccactttaaaacatgcccaggtttggacaataattatatgattaccctaatactgcctcttccatatacatatatgaatttgcagatgttttacatatgtctattcaaggcaattttaataaacttttttttttttttttactttaagagaagagcttaggatttatggagaagttgcaaagatagcactgagttccagtataccccacatctagatttttctattattaacatttttattaataaatcataattaatgaactaatattgatacattattgttaactaaattttatattttattcaaattttcttgatttttccctaaggtcctttttctgacccaggatcccacccaaacaattacattccatttagtcatcatgtctcagactcctcttagctgtgacaaattatcaggctttccttgtctctggtgacatgagctctttttatttttactattctttttgagacagagtctcactctgtcacccaggctggagtaaagtggtgcggtggtatgattttggctcactgctacctccacctcccgggttcaagccagcctcctgcctcagcccctcaaatagctggaactacagacgtgcatcaccacgcctagctaatttttgtatttttagcagagatagtgttttgccatgttgcccaggctggtctcaaactcctggcctcatttgatccacctgcctcaacctcccaaagtgctgggattataggcgtgagccactgcacacagccgacatgggctcttttgagaagtgttgatcaggtattttatagagtgtccctcaatttgtatttcactgatgtttttctcataattaaaatagggttatggtcttgtaggaggaagacgacagaagtagtgtgccaattttatcacattgtatcaagggtatgtactatcgacctggtttaccactgtttatgttaactttagtcacctgattgaggtaggtagtatttgtcatgtttctccactgttactgttttaaaatggttactaacctattcgaagtatagtttatatgaagaaaatgcatacattttaagtgtatgaagacattacttttgacagatagatttacctacgtagccactatcccaatcaaaacgtagaacatttctatcaaccctctaaagttgttttaactccccataattcaatcttttgatttcatgaagtctcgaaagaatccatttagttataattgagtcataaatgcccaaactctgtcaggtatatcacacattttgagtttctctggaaataagtattctggttgttaactgcttgattctattgggttacctttaacagattggttgtttctgcatctatttttcctgactggattaactaggaaatgcagctctaccatcccagggactttaaactttgtcccatgtgtaaaaacttgagggtgggccaggtgcagtgacttatgcctgtaatcccagcactgtgggaagctcaggtgggagggttgcttgaggtcaggcattcgagcccagtgtgggcaacatagacagacaccatctctttaaaaaattaaaagaaataaaaaaaagaaaagaaaaatcaattgatgataagcaaaagtttaactctactctcaaaaaaaaaaaaagattaaccaaagatgtcacaggaaccaatagcttacctcataactgctgagtgtgtgacaagatgtgaagaagctggcatgactttggcaaatatggcatagagcaagctatttgggataaaattatggaatgttaccttctaaagagtaaggaaagcaagagaatcaaatggtattttatattcaaagatttctgaggtgtgctctttacttcagccactcaagtaggagcaagacatatatgatcctaacttcctaagtaagactttgtcaatgttggaaagagatttctatagcagtttttatcaatgccttcttgcaagttgtagttataacattaatcactgttagatttatgggaaaataatgtgttttacaagaagcaacacaaatataagtataaaagctcatgaggagacattatacaagtttatattttatcaatagttatagaatcatggcatgtaattagagctgaaataaatggtaaaactcagagagaaaaattcctttagtttataaatgagagaaatgtataagactacaagatttttttagccatttatatcaattttattgaggtataatttagataaaaatgcacatgttaaaaatatgggttgatgagtttataatatataaagtaaacgtaaaactttatatcataacaactaccacaaacaaggtacagaataattcctatagaggtgtcttatacccttatttactcaatccacttcttaaccccagacctggactgataagctattacttaacattaattttgacttttgtaatatttcatataaaaggtgtcatatgacacatacttttttgtctgtgttcttttacttgctataacatttttgagatttacctatgttgtgtgtatcaacagtttgttcctttcttatagctgagtaatattccattgtaaggatataacacaatgtgtttgtactgttgatggccatttcgttgtttccattttgtggctattttgaataacattgctataagcattcaaatggaaacctgtgttgacacacatttttatgtccttgagtaaaagcaaaaatgttgagttgcatagcaagtgtgtgtttagccttataagaaactgataaaaggttttctgaagcggtaatacccttttacattctgactagtagtatataaaactaccattgcttccaagtcctggccaactcttgggatgctgagtctttttttctagattttgctattctaactggtagtggtatctcttcatggttttaatttgcttatccctgataactaatgatgttgaacatctttttgtgtgcctattatcatctgcatagtaaacataaacattctttttctctgcatgtgtgcctgtgtgtgtattatataacttaactgtacacaataatgaacaaatatatgttttgtgaaatgttctccattcctgctgtcctctcttctatttttttctaagagtcttgaggatgggccaggtgcagtgacttacgcctgtaattccagcactgtgggaggcccaggtgggaggattgcttgaggtcaagtattcgagtccaggattgatattttttccttaaatgtttgatgaaatttatccagacctgaaattttctttgtggaaacaatatatatatttataattttatttatcttattttaaacagttttgttgagatctatttcacttatcataagcccattcatttaaacagtacaatttaataatttttactaatgttaccaagttgtgaaaccatcaccatagttagttttagaacattttcatttccctcataagatctctcatgcccatttacagttaattctaattcctgccaccagccccaggcaacagtgggaaaaggtttgtctctttaatgtactttatgattacaaacagtgggtttgtaattaagagacataaacattttcagatctgggttttttttggtggtggttttagtaaattgtgccttttaataaatttgttcatttcatttagttatccattttttggacatgaaattgcttatatcattttcttatttatttagagacagagccttgctgtcgcccaggctggtgtgcggtgttgtgatctcagctcactgcaacctccacctcccaggttcaggtgaacctcccacctcagcccaccaaatagctgggactgcaggcatgcaccactatgcctggctgatttttgtatttttagcagagacggggttttgccatgtttcccaggctgttctcgaactcctggcctcatttgatctgcttgcctcagccccctcaaagtgctgagagtacaggcatgagccaccacacccgccttcttatctttttaataagtatagggtctagagtgatgtccactcattttatatcggtcatttctgtcttctctcttttcttaatatgtccagctatacattgtcacttttactagtcttttcaaataacagctttggtattattgatttttttctcaatttttacacgttttctcttattgagttatgctttttattatttatttttcctactttgggttaaattcattatatttttctagttcttaatgcacaggttagatcattaaatttaaatatgtttttctaatataaggattgaagctttcaatatcttcccaagacctacattagactacacactacaaatttcaacaggttgcttttgttgtcagtcatttcaaatatttcctagtatttttttaataaataaattttttgtttaaacggtatgttatttgaaagtgtactgtttaatgtttaaatgcaaggtgattttcagacatttcgttatttttaatttaatgttctcatgtcaaaataagttcaatatattttaatgtattcagacttattttatggaatactatggagtctattttgatcagtgctccatgtgtcttcaagttctttgatgttttcttttgcagtgtgcaactgctattacatacaggcaatgaatttcagatattttatttcccatattgtatttttcagctctagacattctaattggttcttttttgtgttttccacttttctccccattatgctcatgttttcctcaaattcttgagaatatttacattagccgtttatattagttttagtggcttaaaacaacagtcatttatcttaccgttctgtaggttgaactacagagtgaaatctctctcatgcttcgaatttctctgacttcctcttttgcaaccaaccaaaggaaagcctctacatttaaaggattcatgtgattaggttaggcttatctggataatctctctatctaagtcaattgattaataaccttaattatgtctgcacaagccctattgtcatgtaatataatagaaccattggggttattttagtattctgtctaccttgctgttttattatatttgtctgctcattcgaaaatatgtaattccaaaatctgttatttttctcctgcattttacatgccttataattttcactggattctgcacaatgtaaatgtaacagggttaagtgtcagtatttcactgtctacttttaacaattgttaaattttgttttagcaggcttaagttacttgcagatcagcgtgaagctttccagacttgtttctaagatgttttagggtaggtgtttagccctactattaaagtataatctttctagagactctactaaatgctctgagggttcaacaagggctctgcaaatgtctcctggtcagccagggtcagagcgcaaatgtctccttgcactgcatgaactctgatgcccttcccaaatagttgttattttcctgatgtcccagatcctcatcctatgttttcacagtttagttgttcagataaacttcaagggaacctcatacaggtttctggtcctctttttgtgtagccttcatcttgcgtatcttgtgtgtagccttcatcaagatgcaggtgacagcctccttaacctctctgaactctgatctctatctcctcaaatttatcaatctatcatggtcagcttgggtctgaatagtggcacgaagcagaaagtcatgacattcatagagctctcctaatttgttccccttctttgggaatcatggtctggagctgctaattacccaatggcttaaacaagttctttcatatattctgtctgattttctaatgattgggagtaagtgagaggggaagtctgggaccaattagttcatcatgaggaagcaaaaattctcaatcgaggttgattggctgaatgaatgtgcacaagagcttaccttctaccatctcccacagaaatgaggctagatctcaatttttatggtttataaataccttgttttttttttctttttgtggggatctgagggactgaacaaagtcataaaataaagaactggtatggctaagatactagcatcaacttgtcttacacaatttctatggagaaaggataatgagaaatgggccaaaatcacaaagaatcaaaacttgtaaggaacatacatgaataactaaagaaatattgtttgactcttaaatgaggtgactattaaacaatatagtagacggtctcataagacatattaaaacatattaagacatttcccagagggaatcacccaatattttgaacattttagaaatagatctataatatccaagttgactacactgaaagacacaaagcttatttggatggccaagttttggtattgtgaaaatagcgttattgtactcagttaatatttactgaattaagtaataaccagaaaggaaaacataccctcaactcacttcaagcaaggcactgaacttgagctcgatgcaggtaggctttgaacttggcagtttcagggttttaggggtggttgacagtagcatctcaataagctacaacaggacgtcacacagagagagggtcctaacaaagcaaagcagcttgtccaggaccttaagatacagtagaggtattcatagcatatgcaggtctagaagacagatagagaacagacattctctacctcttatatggaccatacatatgactgtgggaagagggaaaaaaaaaaaacagcaatcgaacaagcgggtaccaatggttcactagacatgccctgaaggtgccttcccaaagagtaaaaattcaggaaccccctgctgatataaatcagcatctactgatacacagacaagcaatagagtacagtagttaaaagcatgtctggggaacacagacacaagtgtgctctgcttctgtatccacaagctaggaagcacagtgactgaaacacagaccttggagacagattttctgggttcaaatctaagctctggcacttattatattgatgagattggcaacatttttaataactctgcagctcaatttctttatctgaaaaatagaggtaattataaaagtacttaccttatatatttggggaattaaataaattcctaatttactatgaagattaaatatatcagcatgtgtatgtcattggaacagtacctggatcaaagaaactaccagaaaagtgttatttaccatcattatttctgtttaaattagaataatgtcaataatagcaaacatgttcatagattcattgcagagattaaatgatgcattgcatataaactgcccatttcagtgcctaacacagagtaggtctccaataaacagaataagcctcacacattggtcagagttgattcaagaaatacatgaggttcaaccagcatattcaaatgcctccattgcccatagataagcaggtctttagaatgcaagggcgatgtggtttgattcttacaataaagcgaactgtactactttacaattactactagccctaaataggcaaaatatcatatcccacatatctaacacacatataaaaatctatactattgctgcccctcccctcccctcccttcccatcccctcccctcccctcccttcccatcccctcccctctcctcccctcccctcccctcccctctcctctcctctcctctcctctcctcctctcttttcttttcacagggtccggctctttctcccaggttggagtgcagtggcacaatcatggctcactgaaacctctgcctccagggctcaagccatcctcctacttcagcatctcaagtagctggagctaaagacacatgccactacatcaggctaatttttgtatttttttgtagtattgctacgtttcttatcatgagctgaacatgacaaagtgtatttttaagacaatttaaaagtccatcagttatactcaatcctttttaagttttaattttacttcccattcaactggtcatttaaagccagtgtaacgtggagtttgatagtatatcctcaaggtctagagtcaaatcaagaactgactccagggctactacgcttttatgtcgtagagttctaaactttccatagttcattctcagaggagtataagaatcagtagctaagaattaatagctgcttatcttgaagcagtaaccatctaaattagtaccctcaattttgagagactggactcacactagcttaaacagagcataaaatatattgggtgacaaaaggaaatgttcgaaggcaagtacagttggagacattgctggatccactgtcttgggagactttgtcagagctctgcttttcttttcatatcttggatttgcttcgttgtgagggttgattttttttttttctttttgagatggagtctcactctgttgcccaggttggagtgcagtggcacaatcttggatcactgtaacttccgcctccctggttcaaacagttctcctgcctcagcctcccgaatagctgggattacaggcatgcaccacgacacccagctaatttttgtatttttagtagagataaggtttcaccatgttggccaggctggtctcaaactcctgaccttaagtgatccacccgactcggcctcccaaagtgcttggattataggcgtgagccactacgccccgtggtgtaggttgattttattctcagacaggctttcttcatgttgtggaaacaacacctgctagaagcaccgggtctctatcttcatatatatttagctaggaggagtacatctgacttccagtattcatacataaaatttcaagttctttatctatctttggactcatcagctccaccaggggaagaaagagctcagttcagccaaccctagatgtgtgcctgtatctgagtttgggtagatggagcgttaggatccatctcaactcctgaaaaaggagaagggtgctttcccaaaggaatggctgatgatgttaccaaaagaagggaagggacattccgtgctctacacgtctaaggggcactgtagggagactgaaaggattataggggtagggtgaggtacaagaccttctggacgggcctaaagcagagaacagtttttgcctattaagtcaaagccattttgttttctgagtcacagctctggaaggaacaattggtttttttaaattgtagtacaaaatatgatggagagagatttgtacctggagaatcacttactgtatgagtgacttgccccaaagctgttgtttcatatacctacccaaagggcaggacaaaacagtcctgcctgtgtactgagagaagaaaagagtggaaacattgagacctcagaagaaagaaaactggggagtgagtttcctttggtccttaggtgagactctccttgtggctacccagacactgcatccaaagggcaatgagatctgagggatgtaacaagtaaggtctttctgaattgagtgcaatcgatgagacagagcactcatagagcatctggagtccagacttaagatatgtaagcttcaaggcaacaagatggtaaggaagataaactaaagaagcagtaacaaatggcagcatattgattaaactatactttttaccttcctaggcctccactttcggatctataaaataacattaataataatgatatatatcaaatgaggttatcttgagaattgatatctattgtgcctggtacctagtaaccaagtgaaaaatataagctcttggtaatattcattattcatataaaatgtacattaatataaatatattcatatactatttattaataataatataaatacttttagtaatgcctaaatacatttggctgcaagtaacagaaaacacagctaatacttacctatgcaatgagcagatttcttggcttatgtaactggaaatcaaaagaggaagcattggggataatttgatctagtggtacagggaacctctgtgtattgaactcatcttcaggcagctagcgaaagaactacaataatcctgggtctcatatctacgcagaatcatgccagatgcaagaagtgctttcagaaacccccatcaaacctttccctagatgtcactgccttgaattcctgagtgaactaatagaaaggaagataggattaccagtagggatcaatttcaatccacccattgcaggctctgtggagtgaatttctctgcacaataccaaggtttcttaacaaaatgggatcagaaaatggatgaatggatgctagttaagtgacgaaagttgtctattacaaatagataaagcaaaaaagtataacagacaaaaatggaatattctctctccaagataaagtgaacacccattcaaaagtacaataaaatgtgagattgtattttgaaatgcagaagatattgaagagtagaacatcttccagcagcagaacaacaaagaaaataagtaaaattaagatgatcaagaaaacaaaagaatatgaagtaagactgagacctttagttagttattttttactaaccccagagtgaggacagattgattactaaatagaatcaagcctgtgaatacattttatagcttacaatctttgtgcctaaaactaggttcccctccaattaaacctgacattttctaaccttaaagaacctggcccagttttacataaacctgtcttaaacagagatttctgtccatataatctcagaaaaccaaacaaaacgaataccgtgttccttatcaagtgccacatcctatgccatggttaaaggtataaagatgaattataaatcatatgtaatagatgtgtagtgattttgcaagctcagcatcactttccagttcgtctggtaacagacttctctttccatgtagtttaagtggtgctggtgcctggctagaaaaataggtctatgcttcctagctcctctaaccagcctacgggcatggccacagttattaattcctaagtgagcatttgactcaggaaggaccaatcaaagctttacctgcgagttaatcaggttctttaaggttagaatattttagtcctgcacattttttaaaaaagaaaatcacttcaaaatttactaattatctttaagttccagaaactgtctatagcgactaagaggaaaatgatttatctgtcaacatttctgctctgcccactttaagttttggtcactgtcaaataaagcagtagagaatggcaaaaccagttctgtgtcattcaacacatgagtgcttcttaggcacaaaacattatttgaaacatggtcccggataaaaagataaataatacccagcccttaccctcaaggatcttacaacttggcaagggaaataagacatgcacacagatgacagcaataaaggaaagataatgattgctaccagatgtttggggagaaggagcagagcaaagagagaacgcagaataaggcagcattcaacagtcagccaagaaatatttattgagcaatcattgggtgggaaatgaaaatggaagcacagagcatgagccgagacatgtgcaggtgaaaaatcaaatgacattacttgttactccaactctccaaatatttttgtcaccaagtttgtaataaatagcctgaaattaaaaatgaaataaggatatagtagtctctgtcaaagacagcctgaggtgctaatgcttaaacactaggatcatagtatgagtgttcctaagtatgcctctctattgctttatttatatcttcttccaaatgagttgatgctgccctaacagaatatctgttcagctatttcacctttttggtcttgtgtattagaacaggtgaattagaagaggattcttttggcttcaaacagaaagaaagtgctatataatttaaaaagttcagaggcaattcttcaagcatgtttggatccaggaatgcaaatgttttaattaagcctcaatctctctctcattctttatctttctctatctccatgtatttatcttactttggggttcatatatctccctgttcttgtggaagcccctggcacagcttcaggcttatattctcatagctccacaacttgcaggaaggagcaggtaccatcatggcatatggtcattcaacttgtgcatttgtgtagcaaggcattgagtctgaaggtgattcataggcacattgcgcacagagtagatttgtatattaattacagcactgttttctggaagctgactagaaaatatcttgttttgacaaaatcagaatagcacaacaattttccaaaaaagaaacaaagtattttgtggaaggggcccctttgtatctgacttatacagagatggcctatgtggtagtgataaccctatgtctccatcctggctgccccagcgaaagtccagggattatccctgaatggctctggttggactttctgcccaacctggaatagcactacagccagaaggatctgatgttctgattagccaagacttgatcacaggcagtgggatcagttctcctgaaaccatgaacattgaaacaagtaagaggggcatatccaaaaaaaaaaaaaaaaaaaaaaaaaaaattgatgggatgtccctgacaggaaaaacaacaacaacaacatcgacaacaaaaaccaaaaaccttctataccaggaaaccatcatagtgttctttgaatatacaaaaactggtctacacataatacaatagaaaatattggcctaaaaagagcaccatggccgaagggacatgacctattttaacagatgatttgagagttaaaagataacttggagggcatccaattcaatctcatcattttccagatggggaaactaaaacccagacagaggaacagaagtgctgagagcacacaagtattcggtggcggagacaaccaactacgtgccttttgacgttttcccccctacgatgatgataggtttcttcgttacattgccaacaaaaacaaaaagtatagtcttgtttctggttttctctccgccctaaaatctgtataatatgattttgctgccctccaacagaaagcctcaggaagagatggtttaacctccttaagtccgctcccatccccaaggacagacattcactttccttgaattggaagtagagccacttgttgctttaatgggccaaatgcggtctggacctgcaggaggagacgccgctcataaagagcttctcaattgcactgcaacctgtactggcatcctgactttgcccccaaaccccagccagagaaagacaaagaaaggcattcccaatcaatggggacacttgtgcctgccccctctttcttcttcctgccatcacctctttcctgctctttcttactggcaaaaactgccaccaggtgcaccagatgcatctctggaaataggtaggagggagtcttacacctgtcagtgctagaaagtgcgctctgcggagttctcagttgttccctctctgcaacgaagtaaaaagaagggatgcgtccgaggtttttgacacagacatgctggggaaacgcgtcagttcaaggagctctgactctagtgactactgaagaccagtgatgcactcccatgcctagcatctcctcttgacttctgtttccctgcagccaagctcagctcctggccctggaaacccctttgggtaaagcgtctttaagtcaagaatcaggctcctgtgtgcacgtgtggctttcttagcaaaaaactagcacaggcggctcaggagtagagtctagctagggtcttcccgcgcccctccctcactggtttctctgcccctgcctcgctttctcccagagctaagagcctaggctccggacctagggtttgggagcagtcagcacgacgtcctcgccccatcccgcggctgatgacacccgtgcccagaacgtgggtgtgggtagggaggcttccacagtgagttagggtcgagagctaggctctcgcttgctccccgcaatccctagattccctggggaccacgaaactcccattccgaggaaacctccccccattccccagccgcccacccgtttcccccccttacctcagcacgcagcccctccctgcgtgatgatgcaaaccagtggggagggctggcgctgggaagggtggggagagaaggagagccagcgagggagggagggagtgggaggaggaggagagggagccgaacgaccatttaaagcgatagcagtccctgccctctccccagtgctgggctgttggagagagcgagcagcaagccggtgagcgcgagcgcggcgcgccggccggctaacccgagagcgcgaggcgccccaggctggcaggcgccgcgggacccctcaccctctctggtcgcccctccccggattcccccaccctccgtgcctgcaggagcccctgggctttcccggaggagctcgccctgaagggcccggacctcggcgagcccaccaccgttccctccagcgccgccgccgccaccgcagcagccggagcagcatggtccagctgaggaagctgctccgcgtcctgactttgatgaagttcccctgctgcgtgctggaggtgctcctgtgcgcgctggcggcggcggcgcgcggccaggagatgtacgccccgcactcaatccggatcgagggggacgtcaccctcggggggctgttccccgtgcacgccaagggtcccagcggagtgccctgcggcgacatcaagagggaaaacgggatccacaggctggaagcgatgctctacgccctggaccagatcaacagtgatcccaacctactgcccaacgtgacgctgggcgcgcggatcctggacacttgttccagggacacttacgcgctcgaacagtcgcttactttcgtccaggcgctcatccagaaggacacctccgacgtgcgctgcaccaacggcgaaccgccggttttcgtcaagccggagaaagtagttggagtgattggggcttcggggagttcggtctccatcatggtagccaacatcctgaggctcttccaggtagggatgcgctccctccggggcggagcacacagtggctacctgcgcccttaaccctaaaagctggcttggactccggtggtgcgggtcaggtcagccttcgctcatttcctccctggagatcctgccgaatccctcccaccccgctcgaggagataccttccctgcttggtttatttcccttccatctctcccctgtccacgctccactccatccggcttgacatctggatttatggccccatttacaagaagcaatctgcgaaaaacaaggcgatgatttaaatgggtttgcattagggtgaaatatggtccgaaaacaggctcgtaaaagtgccaggctcctaggagagctggttaggagaatggaataggaaagatgagacgatgcctggaaaccgggcatttcccaactccccagcttcccacccccaagccagcctgccaacctgcactcccttgaaaaatttggagacagccttaaggaggcacttcttaaatcgagggctccgtcttaacctagatgtggatgttaagtccgcatctccctcgggctgatttcccgacctgtagccagcctccgcgagagcccagggcgcgaggtgctgggaccttcctcaggtggagagatgctgcccgcagacgtgacccccggttggtttgctccgggcaatattttgcaccgtctaaattacatgtgcgatccggccactggccggagctgggcgatcagctttccactcctgccacttcagacctcagcccagggatgagctcacgcgaaacgaaatcgctctccctgcctcctccctcctcccccccgcccccctcacccactatctccctgacgcagaccccaagccaaatcctcggcttggaggacgattcccggagcgaggcatgaaggcgcccgttgggaggcagaggggtgcgtgaagcggggccccgtggtcctcctgctccggtgccggagggagacggagaaaaaatgggaggaaggcggatccggggccgctgagcggtgggttctgccgcagtgttctctcgcctcctgctccagcagcctctgccccatggctcctgagctgcactgggtaggaatgagtggctttggggtttggaaattgagtttcagggtctctgtgattgtaggttccctcctctgtgtctttccctatatgtgcatcactctctctttctgtctctgtctccttgctgttttttttttctctctgttttttctctccttttcaatctctccctcctttcctcctctgtcttcactcccaagttcttggttcatctccgtattaaaatgacccttttccagtgcatagcggctctctccctggctggtggtacccaaacctagttaatctcttccgcagatgtacacgctgatcctggcacctttatgctcctcatatctagagaaccggcccctctcaagtgctttcccaaaaggtgttgggcttcagaaggggactctgtgagacccaggctgtcatcacatcacctccaggagtgtgaagtttgcattcaggaaagaggagtgcccatccaaggctgcagcttgcatggcccctctgatcctctgagcatctctgacacttcctgagtgccatcatggaaatcctggcaggtctgcaaacccaaaagtgcttcggggctagccatcactctgagttccttgcttttgggaagaacctggcttgtagctgaaacccagagcccttccttcatctttgagcttaaagctagacaagttgaggtagcagtgcagcgggagaggatgaggtcagagacattacctgagaaccactgggggctggggtaggttacagtgttttccctgttagcctgtggggttaaaggcacaaaacgttttgtgtttagtattttaaaattattttgcctgtttcttcactcaccctgggcagtactgcggatcagcctgtctctgtctgaaaaaagagtgaaatgttaaagtcaagaaaggggttacagactaggctgagggactgtgtttgctgaaaaatattccagggggagctgattccttctctggtgtgtgaacctgaggcaacttgctagtggtgaaaaaaggggtggggggctggcctgacactaatttctccattccctgagctgaggagaaagtaacccaatgttagcgttagcgttatggctggggagtaaaaccattcagagaaaacactgtcattttcctctaatttgcaaattgcagctattcatgttggattgaatagctgagggaaaaagagcccctagttttcacctgcgtttatggagaagaggctggtagtctgaggaatgcaccaacttgtagcttgggatgcatgcaagctagataaaacagttggtttgtatgtgtcctggttaatcactgcccatgttggaatatgtgtttcatataccaacaatctcttccagtagccctttttgcgtgtgatcttagacgctcctgtcatgtaattccagtccccaggtttccagtgtctataagcctgcaaaatgagtagagagaataatggtatacacacccattgttcaaaggcacacttagagggagagaaaaaggatatagtgaatcttgtcggggatttctaggttcagttcaattaagattgtcctacataaaagaaactcctccaaatgattgaatttctagctttccagtgatttgagttttctttttcctctgttccctgcaggttgctttagggaccatgccaaaccgatcacttgagatatacgtttatagtgagataagactgtaggctagaagaaggaatacttagcgacttaaatggggggtgctgagcactgaagggaaggagggagaaatgagatggtaacagatgtaacaaatgctgctgcccccagcaaagtcaggaatgaaattccttcctggaaatttggacctgggcaagaatgactcctcagatgtaaatagtgtctatgactttgaattttcatttgactgctggtgtaccagattgaagacataagcttagcaagtcctctttctctcctctctttacacactgagtgggttagtacgatgacatgtctgaggacaggaatcatattcagtgggtcttcaaatcaatccaggaatttgaggctaatgaaattagtgtgtggccagggctctgccaactagaattaaatcactgcaactgccctgcaatgcattttcagcctcaaagaaacatcagggaggaatttctggagatttgttcctaagcttgcgcaaaataatactctcctaatgctaagaaagattaaacgtaaattaatattgactataagtaacatatttaaaaaaaatcatcacagagttgggatggctggaagtagagaggttatataatacggtgaccaatggataaatctcctctgaccactgtcttatgggcaataagtaaggtatattacagtggaaagtcatgggaacattttcattcaaaccctctccattattgacttgagagcaaacactcccagagtataaattacccttgctacattctgactctgaatgaataatatttcctgtgtagtgacatgctctacactatagacttggaattgaatggcatctgattcaggtggatttttttttttttttcctcccaaagcaagtagatggaaaaagcggtcaactctacccttgtcggagcataatgcaaatctaagtctgtggaccttgtatcataaatgaaatgctttagtaaatgtgtcaatgttttccttctgttaattgaaacttgaatgtaatatcaaacttttgggataatattttatacagaaatacctagatttttttttcttttctctctctccatcgtaatccgatagagctgagcacatagggtggtgtggtattactacggtggtgaaatttattagaaaggcaactttaacctacactttttataatttaataagtataggtgtcactgccatttggaatagtctctataacaatctctgcctccacatttactgtgttttaggaaatttacctaacagatggtgagtgggaaatttttaaaggggcatttttaaaaagagcagagggaaggaatgaagacatgcacatattatatttgaagacatctccatgtgtatttcgtgtatacatacccatgcaattaagatgtctttgggcatttttctctttaagaataattgaaacaatgaatgcatttacttcaacttcatgaacatttggagattaacaaattacaagtgctatatttcttacatatatacaggttatatcatagatataaaagaccatacttggattttacagtgtgttttagtctcaatcctgccattaactggctaagttaccctaaataaatctcttaatttttctaggcttcatttgccttatctgcttttttttttttctttaaaaatgtagtttctaaaagtctgtaatcttttttgtttagcttggaaaaaactttgtcttgtcaaaactgtctttgcatttccagctcccacttttggtgagtttgtgggaacttttaaaatatattttcacacagctctcttggtcattactagtcaagttaatttcctgtattcagactgcttttgtattatcttacaatttacttctcaatcatatatatcaaggctactggtagggaaaatgatctctcaggtcagcttactgaatgatcataagacacaaggcagggagtgagaactgtggaatttacagtggcagcaagctatagctttcgtatctccatgtagtattcccattcatcttgcaaaaatatcagacttttctctcccaaaactgagaaatgatgacatcctgcctatcttcctggccccagggatgaggtacgtggccaggtcaaatgaagcaggtgattggttcctttgtaatcgtttgacctcatccaggccaattagaatcttccccaagatgtttctctcagagataaatgggaacactatctcctctctctggaatttttaagctagggagatgtgattctggggctcccagtggccatccaacacaaggagagactttctgtagcatatagtcaagtagatgtgagtagggctgagtggtgggagagaggggagccctgctgatattctggaactcctacattcaactatatctgaatctagatatgtctgtgagtttctaggacgtgttattttttgaaacacatttctttttactattttgagtttgattttagccatgtgcagtggaaagcattatagcaaaagcagctgattttctgcattaatgtaaggttcactaactggcattcattcagtgaaaaatcaggctgtagataacactttctttactttaaacataattcttttagcccagcttcgggacattcaagactcgatgtccttctcttcccaacatttactgtaattgatttcagcctttgtgatcacatcttccctatctcgatgcagttgagagggaagacagacacttctgatgtaaactgcaggatgtataggcctcctatctgaaagctttggaaccacacttggttcctttcattaaagcaaatcttttgttgatatccccagggcacagaaacattttcatggtataatggaatacaaagtacattaaactcctgggtcactctacagtaagcaacaagcctaactctgcttcttgtccccttttacattaagtagacaattaaaaacagctgcaaacatatttcccaaccactaaaatgcatatatgatctctatgtaaaatgatatttatgcaacatatagtctgactggttaattaatggaccttttgtgaattgacacagtcaatatatatgttttctgcacataaaaaatcaaaacaataaaacctatgtacaggtaaatatctgtctgaaagagtgttgagtcaaccttcttcacattatatttccatgtttgacaagtaacctgctttcaactatatttacaactaaatgttttttgaatcacattattagattacaaaatcaaaaatcaaatatatgaatttcaatgatataggatatatgtcacattttatgcaaaccgactttctaatcttttttcaataaaagtagtagtaaccataataataatttgagtccttaccataagccactgtgccacgtgctaaaagtacttcatttcatttaattctcacagtagtcctgcaatgtacatattctcatcccattgttcagctcaggaaagtgattctcatagcccaaagtcacatagctggtaagtggcaaagtctggattcaaacttgtcagatttgtctgacaacaaaccactacgtatactgctcagttgttgcacaaatgcataaatgcttaaagtaattgcagattttcctatcctgaatttatagtggtttaaagacatcacagttgctgattgcttaagcgtatctatttacagaaatatatgttttattttaatcctacaacaagattaattttgtaggcccatagaaacttgagcacacaaacccttacctccaaatgaaaaatgcttgttctcccttatacaacaagtagccccgtatgcaggaaataaatatacagtagacttttcattcaaataaatgagaaaagatgtttcatcttgtcttgattcagtacccaccattatggattatgatggctctttctaaacttcatttcgttcactccaccctttctacaaacctcaagtagggaaatccatcattcagatatatgtgcaaagtgagaggactgttttaatacaattgctgaaagtcaagttgatagagcacaggaagtacatcctaataaatgcaacattaatgtttgtgtgggccgtggagggaagggtaggagagttttcagtttaatgggttattttgcctcttgctgtaaaagagctgcagcttaatagttttataattggtcatttgcagaattctccatctttgggtgttgtgcttttgtcattccacggctgctgactttcttttattcttgatggaaagtagcaagaaagtcacttaaagggctcagtgtagtcttctacattattgtttaaataaaaatatttccatttttaaagggctctttaaacatttttattatgttttaaacttgactgtgttctgaaggggttagctcatgcagacatcagggggaaggtttcccaggagaaaacacactctatcaaaggaattatcagaatttccatgtaggggttaagaatcaaattctggagcaagacaggcctggatttaaatccacacactccacttactgcctgtctgacgttgatcaaaaaggtaccacacctttcaccaattttcttatctttggaatgggtataataaaaatgtacctgtctgatagagtaattgcaaggattgcatgaagtatgcatggaaatattttgccactgagattagcatgtttaatacatttaaaagctatgttaaagttatcagatggacattaagtgtcaatattgcttaattaatcattattgctaattttgaattttgctgtttaattaccatagtagttatgctggattacactcttctctgtttcttctgctgaattgaaaatttacatacatatgtataatttacatctatctatctgtctatctatctatctatctatggagacagagagagagaaagagcaaaagagagaacagtgagacagatagaaggagagagagagtgagagataacacacacacacgtgcacagagagaacattttagtgacgttactcagtggaatgaaactttttatggaactgattaaaggaaataatgaattccatggacttaagataacagcaaggctaagagcagtggaagtctggcagccttgagcttgaattccattgtggaccctttctacctgcagagctttgggaaagttacacttttataagctttactccttctttccttatctttgttttttcctagaaatacttattaaacaccttccatgtgcgcttttctaaatgcttggacacatcagtaaaaaagtaaaagctctctctctccttctcctttcctcttcttttttttttctttttgcttctccctctcttctctcccttctccactctctcctccctcctctctctctcagcttacattctcatgtgtgaaaacagatggatgttataaatacatcctatggatgttacaagttggtgaacattatgggataaggaaaagaatgtggaacttgctgaagatggtcgggttggtagtgctaggggctataagtgtggtctctacttttaagtagggtaatagcgtagatttgatgaggtgacaattgagcaaagacttgaagcaagggagttggcatagtggatttaggggaagaccactccctgggagtaggaatgaccagtgccaaaactccaagcaaaaatgggcctggcatgttagaagaatattgtagaggccattgtggctgagtagagtcaatgaggaggaaggaacagcaggaggtcttgaggtcagagatgtgacggggctagttcatgcaaggccatcgcaggcattttgtcatttactctaaatgttggcagccagtggtaggattttagcagaggtatgagatgagctgtctcttgttctaaaaggacaatgctctgtggtattgagggtaagggcaaagagtagtatctgggagaacagagaagaggcatttccaggtaagatcgatggtttggtggcttgagcttctaagaagggatacgttttgaaggttgaaacaggatttccaggcagatagaatgtgggatgtgaaagaaagaacaggatcaagaccccttaacccaagattttgggcctgggcaactggaaagttgagattattatcatctgaaattgaaaagattcaattggggtggaacagggttaggggttaaggatcagttttggagacagaaggttccagaagtctgtaggtccgaagaaagatctgaactagagatacattgtgtaaaatggagacattaagaataattatccgaaagcgttattttaaagattgaatgaggaagtggaattagcactgtaggttctcaaaacacttagtaattagtgaaaaataattatctgaaatgaaagaaaatcctgtagtttgtttctgcagtaaaactgaacaaaacagtatctcattattttaataacatttgtgacacaattattctggtcagacaccataactataaacatttagaggaagcatttcagtttcctatgtttctccctgatgttataattgcaaccatattttgtaaggtttaaattagttggatagggtggctctttaatgacaatcaattctgagctacttagttaatgcaataatatactatttattattattattttatgttcttcattaaacttagttgaaaatttgtcatcactgatacgcatgatgaaatttaggtagttacccaggtgtttaagaaaaaaataaggggcttatcttaaaatatgcctatgcatacttactttcaacaatttcaccaggcatttcatgtatttccttgactttttaaattaaaaatatgacgggaaattttatctcgtaggttgtcatctccgtttaggtatttgaaaaccattaaacagattttgtggcttaaccaaaattctgttccattttcatttggctaccagatattggtccaagcatgtacttacaataaaaatgcatgaccatgttgtctcaacacatctatgattttattttaacactatcattatgtaagctatattttaattgtaattataacacattttatatcaacacacatacatttctagtgttcagggggaaagcagcgtgtagtaaattttatcaaaatatagcttctgaagaacggaacagagggtaattgtgtaattctgtatttaccataattaagttcagtagagttggcataataaaattaagattaaaaaaaatccccaaaccattgaggcatcctagctccctctcctccactcctttccacatcagagaacacatagttagcatctttctgtatagaaatcaagaaaaaacaggcaagtaaatgaatgacaggcatgagaagagtatggaaagagacatggaaaggaaatgttacttttggatttgggaggtatgaaagatccactagtttgtatgcctactgggaccacaatttctgaaacagttaagctaaaggtcaaaaatgctgtcccgccatccttatgaggagggacatacttatatgctaatcattgcaccctgtttcattgagaagattatcacaaaaactctattatatgaggcaaagtacattgtttttaaatgattgccatttcctcaactgccactctccaagcttgcatgctccatttctctctctcttactctcagtcttgctctttgtttgccttgatctcactctctctctttcatggattatttcagtctggagtgcaaggatggcttacgggagaagatcgttgtattttttttaattttactttaagtgctgggatacatgtacagacgtgcaggtttgttacataggtatacatgtgccatggtggtttgctgcacccatcaactcttcatctacattaggtatttctcctaatgctatccctcccttagcccccccaacccccgacaggccccggtgtgtgatgttcccctccctgtgtccatatgttcttgttgttcaactcccacttatgagtgagaacatgtggtgtttggtttcctgttcctgtgttagtttgctgagaatgatggtttccagcttcatccatgtccctacaaaggacatgaacgcatccatttttatggctgcatagtattccatagtgtatatgtgccacattttctttatccaggctatcattgatgggcatttgggttgttccaagtctttgctattctgagcagtgctgcaataaacatatgtgtgcatatgtctttacagtagaatgatttataatcctctgggtatatacccagtaatgggattgctgggtcaaatggtatttctggttctagatccctgaggaatcaccacactgtcttccacaatggttgaactaattttcactcccaccaacatttttttgggatgacggagtcttgctctgtcacgccctggagtgcagtggcgcgatctcggctcactgcaacttccacctcccaggttcaagcgattctcccgcctcagtctcctgagtagctgggattacaggcacccaccaccaggcctggctaattttttgtatttttagtggagacagggtttcaccatactggccaggctggtcccgaactcctgacctcaggtgatcctttggtcttggcctcccaaagtgttgggattacgggcgtgagccaccttggccagccagtaatttttgtatataaatatatatacagtatagcatagtggttaagagtacaggtgctgaacatagttcagattcctgctttccacttgctaaccatgtgagcttcagcaatttacctgattatcagggtctcactatccccaatggtgaaataatgttaacaatagatccgtctgcataggcctgttttcagtgttaaatgaggttcttcatggcaagcacttaatacaatgcctaccacacagtgaggtctattatttattattaatagtattagcgtcagtattttcagcatgccaggtactgtctttcctagccttattccattatcccctaactccagttcctgtcatgcaccctgtataagggcagggttgtcacagagcttttgcctatggtggtatctgacccctagtcatctctgaggctgggccagttcctggcatttattgttgcccattgaaacaatccctggttgaagaagggaagttggatgttaaggcaaagcagggtgaaagagagattgtttcatctcttcttcacctaggggattgagtgaaatattcatacatcagaaggataatcaggcaatgggcaaaatgcttaattatatagtttagtaattgagaccaagccaggcagactgaattttaactcctttccagcacatactgacggggaacttaggtgtttattgtaacctctctaagcctgtgtctacctctgaaagaaagaaataataatattaggatgtactgcatactgttgttgtgaagaatgaatgactagatccttctaaagcactaggcacattgtttggcatatagcaagtgctcaataaaggttagttgccataactgcttataataactcattatcagtaagtagctgaacaactccgagatccttccttttcttaaattgcacatgatctttgggacaaccagtttacatttatcaagtgtcgtttatatgaaaagcctcaggagcccagaagtctttaaactgtacccccagtcagagccagctccgggcaggccacatcaataccaccactaccaccatcatcattgccatccttactgatcaactggtcatattcagtactttctgtgtgccagataccaagcttatccctatatatggattacatcattttcttctcccactcgggtaggaaaaattcttatcattttactgataaagacactgaggtgttgaaaggataagcaacttgaccattagtgagagagacggagctaggatattcaagcccctgtctctctgacttcatgaacccttgaatgttattatactatatcctggtaagaaatttttctttcagccactcctgtgagagtagagaagcttcttgatttccatatctttctattccctatgacaccctagcctcagtactaggaggtagtgaaggggacctcttcaaagaccattcaaggaaaacttactcctttcagcctttcctgaatcaactaatattttatttccttcttaagaatccccacatgttcctttctgttagttaccttgacctcttagtattcttacattctacacatgactcatccactctatttaaagttaatttatttgaggtcaagtgtggggtcttactcatcctgaggtagaattatcctctatagcatctaactctatgcttttcatctggcaggacttctgcaaatatttatttcagttttgttgaattgtgcttatcaacagtacattaaaagttatgcagaaaatgctttctcataagggaaacattctaactaaaattgtagctatttttttaaataggattatcacagaggtcttggttctgcactttttttttttttagattatttcatattaccttattttaacatgtgttgataagcctgatgatatggtttggctgtgtccgcaacatccaactctcaccttgaattgtaataatccccatgtgctgagggcggggccaggtagaggtaaattgaatcatgggggtggtttcccccatactgttctcttggtagagaataagtctcacgagatctgatggttttataaacgagagttcccctgcacaagctctcttgcctgctgtcatgtaaggtgtagctttgctcttcattcgccttctgccatgattgtgaggcctccccagccgtgtggaactgtgagtcaattaaacctcttttctttataaattacccagtcttgggtatgtctttattagcagtgtgagaacagaccaatcacctgagttttctttatcaagcctacacatttttacctgcttataacttagcttattgattatgtcgttgacttatccatttacaaaaatattatttgatcatgccaggggtgaagtagggtggggaggtgcatcttagaaccataaattggttttctagaaaagtaacataaagaactggagttctctcatatttttgcagaactcattaattgttatatttttataattttattcattcttacttacagactatcttaaaagggtttaatctcaatttgttcatctttctctactcagtcttgatgggaagctggtaggttgaatggaagaaagttatggcatggccgggcgtagtggctcacgcgtgtaaccatagcactttgggaagccaaggcaggtggatcacctgaggtcaggagttcaaaaccagcctggccaacatggtgaaaccccatctctaccaaaaatataaaaattatccgggcatggcggcgggtacctgcgatcccagttactcgggaggctgaggcacaagaatcgcttgaacccgggaggcagcggtagcaatgagccgagatcgcaccactgcactccaatctgggtgacagagcgaggctccatctcaaaaaaaaaaaaaattattatggcatgaatcaagggccactgggtaggagtcagggccttgggctttcctgtttgtttgcttctccccagttaatattagctaatgccttgagtgcttgctgggtgtaagaaactttgctggctgtggcaaatggattgtttcatccaagttttttgagagtcatacagtgagaatgtatgttattatgacccccatagtgcacacatggagcagagctttgaagtgcctatatactcatgttaaaatatgatgatggtagagcttgaactcaggtcaatgtgactgataagtcagaggtttttaccactaattttttttttttttttttttgagaaggtgtctcgctgtatcgcccaggctggaatgcagtggcaccatctcggctcactgcaacctccgcctcctgggttcagacgattctcttgcctcagccactggagaagctgggattataggcacccgtcaccacgcccagctaatttttgtatttttaatagagacggggtttcactatattggccaggctggtctcaaactcctgacctcagatgatccacctgcttcagccttccaaagtgctgagattacaggcatgagccaccaaccccggcctaccactaaattgaagttgtgtaaccctacgaaggtgacacaattttaagtagcttctataatttcctcagctctttttgtaatgaagtctttgtctgattgcaagcttacaggaggtgaggagtgtgtggaggaatttcagccaattgaatggaattttccttaatatggatggagggctgttttatgacattaataaataaatccattcattcaaaatatattgagtatctactatgtgcaaaggcatttctcagcacttgcatcatgttagtgagcttctcttttttaaacttcccacagcaggcagagaagtctggtactggtttgcctgctatacggaggggtttgatgcagggagcctagctgattccacagtgtcaaaaccaagacaaactcacattaattcataggcaccttgacgccaggatacagcagcacacttggatcttactattgttgactgggattgatgataaaatagctttggatttgttatgaaaagtgggtatgttcatggacttcatggttctatatagatatgtagacacatcatgtgtcatcaacctgcagctacctgccatcccctgctactcctgcttttacatgccaagcaagggccttctcatctcgcttatggataagcttttaacagtggcaatggggcctagcatcacctagtaaccatatcactggctaaaccagtggtttttcaaattcgctctttgataggcccatgaggtagattgacattccgcttgtatgagtagaaaatggtgttcgtttataattcatcgggaagaaaataggccactggatataatttcctcaattaaaaaattttcatatagatggacatgaaaaattttaaattgaggatatatatacacatatacctacacagatatcacacacacacacacacacacacacacacacacacacacacacatatgacttctgctagtaaattacaaatgaaattgttagtagctctgtatacacataagcaggaaagtagctgatcagatttaactcaataacttacttttttttttttttacagatctgtggttacaactctatctacagatatatttgctgaagaaaatatttcttccaccttccacagcaaaattccattcatttaagaccaatacagcatgtcccaaatgtcttagtccagttttaatctttaatagcttcagaagtgtgaaattacaaacatgccccccaaaaatcatttgaaagtttaattatttaaatttctctttgtatttacatttgtggattttgaaaaatcaatatttaattgtactttgtttgttgctgtccttctgattgaagatggcaaacattgacttaaagaccaaaaagttgtaactaaatatgtattattcaaaattatcaaaactaaataagtgaccaagaaattcaaatgattagactttcaaagggtgattttttatgtgtttgcgtgtgtgtgtgtgtgtgtgtgtgtgtgtgtgtgtgtgtagtattttttcttctgaagaaactgatcttgaaactctactaagattttagggacatctagtttaatgagcaaatgctttgtgtctgggactgcagcatgcactagatatttaagagattaacataaaataataataataatacaaaaacaacaacacatcctctcagacatggaagaaaattccacttgagaaatggaccaatacatcacgcactaataaaatagcaaaggctctcaaacatcaatgtgctgaagaatcacatggcaagcatgccaagcaggcaagttccagggccccttctccaggtgtaaggctctagaaactatatttttcttgaatgctctcaggagattctgagattggtgttttcaattgccctcaaacttaagtctgcatcagatctgcctgaaagtttgttaaaacacacattgttgggctccaccctcagagtttctggattactagatttgcatttctaaccagttcccaggtgctgctatcactggtccaatgaccacactttaaaaacccattgcttacagaaaataccttcagtataggatgtgtgtttcatgaaagatgagtttacagagacccataggagtgcaaagggcctctaccctaaattggccaaaggtagtctaaaaactagctagatttttattgaaccaagcaagattataagaactttaattgaactacctcatttaatattttcaataagatacgtaagtcctacttaatgtccccaatttacagataaattaatttacccaagtcatacaaccagtaagtagtagattaaaaattcaaatctagaaagtctgattccagagcccacacacttttatacttatattattttcaattgacaaattataattgtattacatttatagaatacagtgtgatgtttttgatatatgaacatagtggagtgattagatcaagggaatcacacttacttgacgttgttttgtggcgatacatttgaaatttattctcttattttgaaagatataacacactacacccttacctgttctgttttacttattttgcttaatcattctgcttatatacaggggtaaaatgttgtcagcccaggctttctggaggaactgacctctgagtgtaatttttagaaagatgagtggacataaaaatattaccattttttaaaagatgttgtgaatagtatcaggacttctaaaagagccagacctcaccacacagttacctcaagcaaatctgatgattaatagtctagaataggaggataactatgggatgctaggaagaattctgggaacctgaggttagaattcagtatcgatttataatgagtttacctgcaataatagaacctgaataagagttacttacctaactttcctcatgtaacagtttggagattgtttttatgttaattcagccactaagtggtatccatgagggactaggttctcttatcttcctgtcccctcacctctggtgtgtcactgtgttacaagagagttgcaagacggctactgaatctgcagctgcattcccaatgtttaacccagaagaaagaacatttaaaaggggatgtggagcaaagaaagtatttaccaaaactcatcatcagactctcacttagatctcgttagctagggctttaaactggccaccttagttttgaggatattagggatttggcaatcagggttttgatagcagggaatgaggggagaatgggtaattaatcagatggctcacagagtctgcacagacttcattcccagtctccccgacaaagaaccccaaattctactttattttatgcattttaccttgaatagtggggaaaaattacttatctgtaaatagcctcctacaaagggtgcaattacataattatacaaccccctagagagcctctttcttctaaaaactctttgaaaaatgttcaaggttgaggatattttgatcttaatttagtaacttgcagttgattatcctggaatgacattctctttctctgcagatgtcctggcgggctttagaaacttctggaagaagtggacagagaattcttatggttcacatataaacaatatgaatcttttggaagaaaaattcatttagggaccaaaagcccctttatatctgattttttttccctctcaccaaattttcacaaattttcctttccaaaatgcctttgagcaaatctgtttgatatcaccccatccacttctcctgtctgaattctttattactaagaatccttcagcattccatctctcactcgtctttgtcaaaagcatttctcagtgtctttattccttctcgtctcgtatttggactcatctctcaaactgaaaaaggagatggctatggtttctccagaagcttggagaacttccctttgcaaaaaaaggtagcgatgttaattaacttgaaaggtaagcaatgtgtgtaatgcttctaataatttattaaaagtttattataatcagtatgttattataatttattataagtttatctctcagttactctgtagttcagtttggacttcactggcttagcaatcagttttctgctcagtgattcaagagcctaccgtttcaattatatgcctgtacattgtctcaaaaaggaaaggagacaggaaattgcaagctcaattataaactcattattcctcaaatacacattctttttttcttttaatttttatttttagttctggggtacatgtgcaggatgtgcaggtttgttacatgggtaaatgtgtgccatggtggtttgctgcactatcaacccattacataggtattaagcccagcatgcattttctatgtttcctaatgctctcccttccctcactccaccccccaacagtctccagtgtgtgttgttcccctccctgtgtccatgtgttctcattgttcagctcccatttataagtgagaacatgcggtgtttggttttctgtttctgcattagtttgctgaggataatgtcttccagctttatccacgtccctgcaaaggacattatatcattcattttatggctgcataatattccatggtttatatgtaccacattttctttatccagtctattgttgatgggcatttggtctaatacccacaatctacaaggaactcaaacaaattttaaagaaaaaaaaaacctcattaaaaatgggcaaaggacatgaacagatacttctcaaaagaagacattcatgcagcaaacaagcatgaaaaaaaactcaacatcactgatcattagagaaatgcaaatcaaatatacattcttataaaatttctggtagcgttctgtgggccagtaagcagtaatgtggccacactcagatgcatagacatggggaatactatcctaagccttatctcaacactgctacaatctggaggggctaaaaatgtttagtcaataggtgttcatttctgccacaatgatcgattagtctaaggcaattgaattgtgtgtgtgtgtgtgtgtgtgtgtgtgtgtgtattagtatgagctgaaacttgtggaagtccaccttaaaaatatagataaatccaactgtggttcactgttatctttcctggttgcagttgattactgttttccttcatcctctacctctcatccaccttagtatcagtgtggtaaaaactgaaagaaattattccaagatctccaattctttgaaaggtatagcatacctagaccctaacagttttactctgtacaacttttaccaattccaaatgatgaatttgtggaaaattaatgcagaaaaaaaggctgattttcttttgtacaaatactctgagccatgttgcagggtaattggaaaattcgggaaatctaaagcttcttgttgaaaattaaaatacttttaattataaaagtagcataaactcattgtggaaactacaaaaattaaaaaggcataaagaaaaagtataagccaggcatggtagcattagcttttagtcccagctactccagagcctaaggctgcatgtttgcttgagcccaggagttccaggctgccatgggctatagttgcaccactgccccccggcctggacaacacagcaagaccttgtttcccaaaaaaaaaataaaaagtataaataacttaaaatcccattatcccatttccaataaatgatcttcataacattcttgagatatttttgtttgtgggggtacacacaggcacaatgcaagcaaatatataatacttttaattattagaccaaactataaaaatgttttgtatcttttttgcttattagtatataatgagcatgattccatgtcatttaataaggctatatcacaaacttaaatagctcagcagcatttcattatttacgtagccagtttcctgccactcaaaatttaggtttacctctctcttttctttggtactacagaaaaatgagaaaaacatctttgtgcatatgtcttcctgcatttattcatttccttagaatgactttttagaaattgaagggccacttttcaatttgagtacatattgacgtatgagcctatggaagagttgcactaccttacctttctatcagcaatttaacatcgtgtgtagattctcacactctctacagtaccagcattagccatttatttcatttgtgccactctgttgagtaaaacatgagacctacatgattctaactatatttctttggttaataattgtgagattaaacttattttaatgtatttattgactgtttgtatttcttcttttgtgactttatgacctttatgcatttattcacattgatttacaataactttttatatattataatgtttattattttgttatagttttcaatgtaatttttcttttttaatttataaattataatctcatgtttatagaaattctttaatattgtctagtctattcaaaaacactttaatagttcagacacagggagaaatcatcagtcactctcttacattttataatcaatttatttcctttgccagtatgtgaatataactccttattttatattatgtttggaaatgatttattccctctgaaagggattatagcctctatgaaactgtaaagccagattttatatggcacatagggtgtataggaaaaatgaaaggccataaatcacactccattgaatattgccttatttataaagatggcattttaggttgtatacttgtcatcagataagcataattaattttgttagtattagcaagaacagcctaggaaagcttcacagcaagaagtgagtggttatgggagcaggaaatagcctctgtctcatccaaaacagcaaggacttgaaaccgtgaggatcctgcttatagaatcttgatccagtcagcccagccaacatgtgttgtcaagtagggcaagtagatttgagaagtctgagaagttatcttggtctcttctggaaatgagcagcaacgtactgtgcagggcagagatcatcagcacaaggtctggagacatggaactccccctatagccattaaagtcagtgtgagacaaaaatgccaatataagttatattgatgacagtatcagtgagatgacatttagtcctctaaaattccaacatgtttttgcagtgtgccatccattggtaaataggcagagccatttgacagatctattcagtacaatgaatgaatctggcactcacatttagaaaaaatgaaattatatcaatttgtcaagtacagtagctacctgttctgttttatttctccaggtagaactagatgacattgcaggcagtgagatgttatcatgtttgacccctggaactgtccaaaaatggaagaagctgcctcatcaggtagttaatttcttgtcattgggagtattaagtaggtttgtatgatcagcaagttaaagagcctatttatcatttctaaaatattgtacacactagtgcattcaggttagtataaagaattcctcacaatatattaggacagttttaaatattttaatttgattagacacaatcttttagttataaaaaacatcaccattttgaccatttaaatatgcctttattttctcttgtaacctagctgtgtagtcttgggcaagtcactacactgtcttggacacaattttcttttcctctttatttttttttctgagacagagtcttgctctgtcacccaggctggagcgcagtatcatgatctcagctcactgcaacactcgcctttggggttcaagcaattctcctgcctcagcctcctaagtagctgggattacagacgcccaccaccacacctggctgatttttgtattttaagtagagacagggtttcaccatgttatccaggctggtctcaaactcctgacctcgtgatccacccacctcggcctcccaaagtgctgggattacaggcgtgagccaccgcgcccggccagacacagttttcttcatgtgaggtagaaataacacatgcctttaaggactgcagaatgatgagtggtgatgttcttgaactcttccaatactccacatatatacattatttctatccctggaaaatttgcattaatgaaataaagcattcttagtataataagtctgagcagatgagaatttaagtgaaggttctatacacacctgatgcacgacaggcagacccccaaattgaggcttagcccgagagggttcttagcttcacccacgaaacaatttcaaaggcaagccagtggtgttaaacaacgacttttattgaagcagtagcctacagcagccgcagaggtactgcttcttgcagagcagggctaccccctaggcagcgtgcccagcttaggtagcttagagggagttctgcagtcatacttagacccacttttaattatatgcaaattaaggggcaacttatgcagaaatttctaggatgaaggttgtaacttccgggttgtccaggttgttgccgtgaaaaagggcagtaatttatgggtattgccatggcaatgataaaccaagatggcacattggtgggagtgtcttatgcggaggtgtttccaccctgacctgtttgagctagtccatcatttggtcaggtatccaagcccgacccccaaagcctagtcctgcctcctaccacacacccagaaatatggatttattcccatgtccggtgcaaatgtaggaaaagcattattttcttattataagggaggtattatgaagaccaaccaacttaaagagtttctgtgttggaaattgagagacctcatttccttctgtgtttaccccacaaatgcccgcaggggctctgaagttttgtagcagcaacctcatcttacatccttgtcattacaagtaaacagtgccacacaattaataactaataatagttacaagaaatatcacttattgaaggtctccagtctattaagtattttataattattaacatattgatggatgctatattttgttttcaagttagtttgagtttcttttcagctttactgacatataattgacagttaaaatttgtatatattcaacatgtaccacaagatgatttgatatatgtatacattgtggaatgtttaccacaatctaaataattagcacatctattgccacacatagttaccattgtgtgtgtgtgtgggtgtgtgtgtgtgtatggtgaggacactaagattttctctcttggcaaatttcaagtaaccagtgctgtattattaactatagtcaccatgttgtacattcgatctgaagggtactacattgttatggttaagagtgtagtcccgcatgttgtcaccataagtgggagctgaacaatgataacacatggacacagggaggggagcatcacacacccacacaccggggcctgtttgggagtgaggggctggggtagggatagcgttaggagaaatacctaatgtaaatgatgagttgatgggtgtagcaaactaacatggcacatgtatacctatgtaacaaacttgcatattgtgcacatgtaccttagaacttaaagtataataatagtaaaagaaaacagtatagtttctcaagctcaataattctgggttggaatctcacttccattatgtcttaattgagtgacttctggtccattgtttatgcttcatattcctcatgattttttttctgtaaaaaaatactaatgaattattgtctgatatatagaatatttgttgaatgaacacctgcttaggcgagatggtaaatgtgatgtttagcactgtgttacatatatcattactctgttaattcttgcagtaatttaactggtcagtaacaataataataataataataataataaacagtttaataaaatgcttaggatgtcctaagcactttgtatatataattcatttaatctatactacactattttatatagatattatcttccaagtttttttttcagaggacattgaggatcagcaagattgagtactttgcttaacccgtgaactcaggtcagaattactccaaacataatttttaactacaaaatgtctatcattctacctctgaatttgttgttgtttttaacttccatacatctgatttgaaattcctttatatatttggggaccttttcactttatgagtcttgttgagggacagtgcctttctcccactgtttaaactgaaaataccagacacatttacatgtaaacaatgtgaaggaaagttgactctctttatttttttttttagaagtaaagtttaaagtctttttattttattttattattattatgctttaagttttagggtacatgtgcacaatgtgcaggttagtcacatatgtatacatgtgccatgctggtgtgctgcacccattaacttgtcatttagcattaggtatatctcctaatgctatccctccccccttcccccaccccacaacagtccacagagtgtgatgttccccttcctgtgtccatgtgttctcattgttcaattcccacctatgagtgagaatatgcagtgcttggttttttgttcttgcgatagtttactgagaatgatgatttccaatttcatccatgtccctacaaaggacatgaactcatcattttttatggctgcatagtattccatggtgtatatatgccacattttcttaatccagtctatcattgctggacatttgggttggttccaagtctttgctattgtgaagagtgctgcaataaacatacgtgtgcatgtgtttttatagcagcaggatttatagtcctttgggtatataccccgtactgggatggctgggtcaaatggtatttctagttctagatccttgaggaatggccacactgtcttccacaatggttgaactaatttatacttgcgccaacaatgtaaaagcattcctatttctccacatcctctccagcacctgttgtttcctgactttttaatgattgccattctaactggtgtgagatagtatctcattgtggttttggtttgcatttctcttatggccagtgatggtgagcattttttcatgtgttttttggctgcataaatgtcttctgttgagaagtgtctgttcatgtcccttgcccacttttggatggggttgtttgtttttttcttgtaaatttgttggagttcattgtagattctggatattagccctttgtcagatgagtaggttgcgaaaattttctcccattttgtaggttgcctgttcactctgatggtagtttcttttgctgtgcagaagctctttagtttaattagatcccatttgtcaattttgtcttttgttgccattgcttttggtgttttagacatgaagtccttgcccatgcctatgacctgaatggtaatgcttaggttttcttctagggtttttatggttttatgtctaacgtttaagtctttaatccatcttgaattaatttttgtataaggtgtaaggaagggatccagtttcagctttctacatatggctggccagttttcccagcaccatttattaaatagggaatcctttccccattgcttgtttttctcaggtttgtcaaagatcagatagctatagatatgcagcgttatttctgagggctctgttctgttccattgatctatatctctgttttggtaccagtaccatgctgttttggttactgtagccttgtagtatagtttgaagtcaggtagcatgatgcctccagctttgttcttttggcttaggattgacttggcgatgcgggctgttttttggttccatatgaactttaaagtagttttttccaattctgtgaagaaaatcattggtagcttgatggggatggcattgaatctataaattaccttgggcagtacggccattttcatgatattgattcttcctacccatgagcatggaatgttcttctatttgtttgtatcctctttatttcattgagcagtggtttgtagttctccttgaagaggtccttcacatcccttgtaagttggattcctaggtattttattctctttgaagcaattgtgaatgggagttcactcatgatttggctctctgtttgtctgttatttgtgtataagaatgcttgtgatttttgtacattgattttgtatcctgagactttgctgaagttgcttgtcagcttaaggagattttgggctgagacaatggggttttctagatatacaatcatgtcacctgcaaacagggacaatttgacttcctcttttcctaattgaatgccctttatttccttctcctgcctgattgacctggccagaacttccaacactatattgaataggagtgatgagagagggcatccctttcttgtgccagttttcaaagggaatgcttccagttttcgtccattcagtatgatattggctgtgggtttgtcatagatagctcttattattttgagatacatcccatcaatacctaatttattgagagtttttagcatgaagcgttgttgaattttgtcaaaggccttttctgcatctattgagataatcatgtggtttttgtctttggttctgtttatatgctggattacatttattgatttgcatatattgaaccagccttgcatcccagggatgaagcccacttaatcatcgtggataacctttttgatgtgctgctggatttggtttgccagtattttattgaggatttttgcatcaatgttcatcaaggatattggtctaaaattctcttttttggttgtgtctctgcctggctttggtatcagaatgatgctggcctcagcaaatgagttagggaggattccctctttttctattgattggaatagtttcagaaggaatggtaccagttcctccttgtacttctggtagaattcggctgtgaatccatctggtcctggactctttttggttggtaagctattaattattgccacaatttcagagcctgttattggtttattcagagattcaacttcttcctggtttagtcttgggagggtgtacgtgtcgaggaatttatccatttcttctagattttctagtttatttgcgtagaggtgtttgtagtattctctgatggtagtttgtatttctgtgggatcagtggtgatatcccctttatcattttttattgcgtctatttgattcttctctcttttttctttattagtcttggtagcggtctatcaattttgttgatcctttcaaaaaaccagctcctagattcattaattttttgaagggttttttgtgtctctatttccttcagttctgctctgattttagttattccttgccttctgctagcttttgaatgtgtttgctcttgcttttctagttcttgtaattgtgatgttagggtgtcaattttggatctttcgtgctttctcttgagggcatttaatgctataaatttctctctacacactgctttgaatgtgtcccagagattctggtatgttgtgtctttgttctcgttggtttcaaagatcatctttatttctgtcttcattccgttatgtagccagtagtcatttagtagcaggttgttcagtttgcatgtagttgagcggttttgagtgagtttcttaatcctgagttctagtttgattgcactgtggtctgagagacagtttgttgtaatttctgatcttttacatttgctgaggagagctttacttccaagtatgtggtcaattttggaataggtgtggtgtggtgctgaaaaaaatgtatattctgttgatttggggtggagagttctgtagatgtctattaggtctgcttggtgtagagctgagttcaattcctgggtatccttgttaaatttctgtctcgttgatctgtctaatgttgacagtggggtgttaaagtctcccattattattgtgtgggagtctaagtgtctttgtaggtcactcaggacttgctttatgaacctgggtgctcctgtattgggtgtatatatatttaggatagttagctcttcttattgaattgatccctttaccattatgtaatggccttctttgtgtcttttgatctttgttggtttaaagtctgttttatcagaggctaggattgcaacccctgccattttttgttttccatttgcttggtagatcttcctccatccttttattttgagcctatatgtgtctctgcacgtgagatgggtttcctgaatacagcacactgatgggtcttgactctttatccaatttgccagtctgtgtcttttaattggagcatttagtccatttacatttaaagttaatattgttatgtgtgaatttgatcctgtcattatgatattagctggttattttgctcattagttgatgcagtttcttcctggcctcgatggtctttacaatttggcatgattttgcagtggctggtaccggttgttgctttccgcgtttagtgcttccttcaggagctcttttagagcaggcctggtggtaacaaaatctctcagcatttgcttgtctgtaaagtattttatttctccttcacttatgaggcttagtttggctggatatgaaaatctgggttgaaaattcttttctttaggaatgttgaatattggcccccactctcttctggcttgtagagtttctgccgagagatccactgttagtctgatgggcttccctttgtgggtaacccgacctttctctctggctgcccttaacattttttccttcatttcaactttggcaaatctgacaattatgtgtgttggagttgctcttctcgaggagtatctttgtggcgttctctgtatttcctgaatctgaatgttggcctgccttgctagattggggaagttctcctttataatatcctgcagagtgttttccaacttggttctattctccccgtcactttcaggtaggccaatcagacatagatttggtcttttcacatagtcccatatttcttggatgctttgttcatttctttttattcttttttctgtaaacttcccttctcgcttcatttcattcatttcatcttccatcactgataccctttcttccagttggttgcatcggctcctgaggcttctgcattcttcacgtagttctcgagccttggctttcagctccatcagctcctttaagcacttctctgtattggttattctagttatacattcgtctaaatttttttctctttatcagtcttccttgaaactggaagacagtcagatgacctaggattggtcaattacactcaagtcctatattttgaattagaaatgaatgatatgaggaagcaaggacctcagagaagcccttccaggagtaattgaggaggcagcagtgcctgggtcagcatcccgtatcctgctcctgttgggtcagcgaggcaggcctgcacatacacttaattttgcatgattctataattttgatagcgtgccctaagttctggttctttagtctgcttctagttactgaaacttaatcaataacctttcaaaaatcattttctgctcaaatcagctgtatctggctcctgttgcttgcaaataagcactttcttgatatccacctacatatccaggaaggtataatatattcctgtcagggacaagagcaggaaagcttcctgagcatctgagagtgaggaaaaagaaggaagaattggagccaattctgcttgttttagaattgtatttgtagctgcccgttttacatatcacatgctaaacttcacctctctttacccaattacagacacctgaggggtaaactctgtgttggcaacccaacagccctctgtgctgggccacaggcatcccaggatgtgaaagacttccctcaatgtctttgttacttgaggctacatcattcctctctttggagatcagcttctgttgtgtgggacaaaacgatgcgaaacccgaactcaaatagaaagatacaaaaattagctacaggtgtgcatggcccagggatgaagttgagatttcatgtaatgtgtcctctttctgtcatgaccttgatgatgatgataatgatgatgatgatgatgatgacgatagcatcagtaacatttattgattttttcctagatgaagggcatatcatcttaataaccattttttaatctccactatgacctaatgaagtaagcattatattatttcaatatcctcgagggtcaaaaaaattaaggaagttattctagctcacaactgggtggtagaacaacaatgactggacactggatctgcctgaattatattgtgtgagcagagccacttacctatttctggcatattgtaactcagaagctctggggttattgtagagcagctgagtgtggttgaactaagatgtcttaatagataatattaatataaagtaaattactttaaagtatcttggcatatattgcgttactctcatatctgtcattggttctattggtaactgttgagaaactcataacgtgaatcctaattcggcctctaactcatcgtttatttgacctaattgaggcaattatctttgtgttgttttctttcctacagacataaactgagcatccaaaacatgcccaccatcttgtaagtatatgccattagttttataggtgctcaataagatggagaaagagaaaaagacacaaaaatacacctctcagcatttgaaatacagtcatcaatttttgtgccttttatattgtcagttccttttaacatttactaacacccacacaatttatatttttaataaagcaatttccttaccaaacattttacatttggttattagttatattctggtattctaacaataacactaataattataagctgttgaaaaattcatcagaccctacatttttatccccacatcctgaaaataaagtgggaaataaggtaaagagtagaaaatctgcctatgtttttcttcggatgacatgagatgctcacctaatatcactcctttagcattttctattaaattgttcattctttcctgggggcatatgaacagcttccattacggtaaatgtcagtcttgagtgcaaacctagaagagggcaaatggaaaacttttagacaataagtcaacttttcttcaaaagttcaaccactatacattccatggtgaaaatatttctatgtacagatgaaacctcttaggtttggggaaatttcaatagcagatagtgatcctgagtacacctagttcatttctctctgcttttcccccttgttacattgagattaaaatctgtagcagaattacatattaagcagtctaggaaattgatatgacatttggtctgaatctccaaagtaaattttagatgaagatgctatgaaattcacataagaaaaaatcatcagaaatatttttatattatcaaatgtactgcaataatgaaagcaaatcccacttctagctaatgaaacatgattctttaggtgatattatattgtggcagaaaagggatttatgtcatctattgtttctatcctaaaaatgctagaatgggagcaaataagccaaattaattgtaatatatacattgtaattgtaatatatacatacatctctataggtgtatatatatacatatgtgtgtatatatgtatatacaaatatatacacatatatattgcatacacacatgtgcacacatataagtaaaatttcaacttgcatcctcagagcaggttttgtggggaagataggatgtaaactgggtaggcttccagcagctttactcgattctgactttaggataaaatcaagcatttcaactggtcagtcagtctgaccttgatggaaaagcattcatctggatggaacactataattaaacatgcagttgtagagatgccctggctgtattattccagtgcctggaaggtattgaaacatctattttctctaggagatggaaaggtatctcaagtgaagtctaagtgtaataaacagaggccagtgctctttgttgggacattgctttgatcctataacaagtaacaatttcataatctgtttaagattgtctttatccaagagggttcttagcaataggagtagaaaagaaaagccgctctttctgggttcttgctctttgtctatgaaccagagaaggtgccaatagatgaaccaggtcacagctatccacagcaggagacaggacgattattaacactcaatctactggaaagtaaatggaagtctaaagaaagactccaaagatttctataccttatatacttgatacaccaaaagtgtcgcctcagtggatcccttcccccaaaatgccaatatgtttttgccagtgtgtgacagaatctgaggggtgaaattaaggaaaagaatggaaagctgccttaagattctagctctttgaacagggaacaaacaatacgttttcaataatcttagcaaccacacttgtaataatgaccatcagaataactgctgttttctgccatatggtaagaacactaccaaacttatttttttcttcaactttacaactcaaattctcttattattttcattttacaaattaggaaagtgaagctcagagatactgtcatttggccaagatcacacagctagtaagagataagtctgaaccctttttgttggataccaaagaccacaattttagtccttcagaatctatctcagagcatttgagtaagttaattttaaaaagtcctcctaatcagattgatcaggccattatattaggttaagcaaagtgggaaaatggcataagaatatttgaattgtaaatacaagaatttacttgcatctaagttatccacataatatttagctgatagcttcatgattacaacaactgaatggaaatgaacatgttttgctgtttggaataagattgcccattgagtaaaaatatatatttattcctcacccaatatgacatgaggtgcagacgacattgagatgccatctagtagtgctcctatgtagttcatcatgtcagcccagccaataattttaaaatgttttgagtctataatgaatgcacccataaagcatatttctaatcaatgcaaatattttcctatgctaaacccgagttaaattataacatgcagcataagattaatgggccattttttcttcatcagtttgttaaattacttagtttggaagccattccaaaggatgtgaattggagctgtgctgtgctgttgcaatgagattctgcttttttgatgaaagtattcccacgcctgccccttacttctagcttcttaggaaagaagggaaagtttcttctggtaaaaagtaacatgtttatgggctggctcatatagtatgaatgaaagaattatgtgtcttctaagccaagcctgttttggcatataaaataatttttacctatcatttcataaaatgaacatttgattttcaggtgaagtcttaggtcatttgactcctggatcactttcatgaatagattttgcttgatataacttgtaactcaatatattaactgcaattcagtctgcctagctgatgtgcataatctaaaatgcaagtccctgcagggtaagcattgcacctgcatcatcagtgtggcctgattttgagctcaacgtctagcatttaggagatgttcaataagtggtagtgaggtttgctttccactttagagagaggcagggtattcactcactcttgtgtctggtgaacactggatacaagaatcttgctacattattcttcatttccctttgtgtgcaggctgaagatttttttttccttcttaaaatgcctatctccacttgttttcctggaaaataactcttctttcttgaattcttagtcccattgttgactgcttgagattgcatttattacttcctcacaaagagaatttatttcgtcttcaactgtgctccaacaattgtgtgtgcatgtgaatgtatgtgtgtgctctattacaacagctatcatattgtatcatggttatttgtttgcctaagtgtttgaatgatcagaaagaattcttgagtgtggtgtatttctgtttgacagttatcctgagcaaattactccaacacatagtcggtgctcctaggatactggctgaattgaattacattttattgccaacatatagacaataatatctcattgttcttttgaattccagctgggaaatcagctggaaatgaaccctaaaagttctgtacctcatactattgaacagcttctttagttattgtgtatgggaagcagtactgcttgtcctgctagttctcaaagtgtggtactcagaccagcacatcagcatcactggggaattgcaaattcttgggccttgccctagacggaaagagtcagggactctgggattgagccccagtgtctgtgttttaacaaatgctccaggtgacttcaatgcctactcaagtttaagaaccaccagtttagatctagagcttaagctttaagcttggagcagacctgactcttaaactccactcagccattagagtgaccttgagcaagttactcctggtaccttctcaccatttttgtgtcttgcttagcttattgggataattacattagattagtgcattcaggagagtgcctgaaacacagtacgtgttcaataaatgctagctgttaccattatcatcgttcagaatgtattaactcatcctgaagacacatttcacataaaggtaataatgtggtttgtaaaattagcagcttagaagaaatgtattaagaagttcatcaaacaaggtttcagcaggaaatctgtggtactctgaaaagggcaatttgagcaggatgtagggaaacagagatagtgtagcattagtgggtcagcaaaagcttggccacttttatcactcttggtctagcagggaaggagaagaaaggcactgctggagagtgggggcctccccatagaggctgtggccttaagttgagggatgccgccatccatcactcagcaacttggcagggaggaaaccaaaggaataaacacctgacctcactcttctttcaccttttctctcatctcccatgggtgttctccattggtgaacccagtgagaagctagaaggcaaggacatccatcaagttaggccatgcgagacatccagggcacagagctggatggagaaagaattcgaaagggctgataggatatatattgtcagctgtaaaatcacttgtcgttctcatgtgatggccattacagaaacagagagagacaagtagttagtgcttatttggcagacccagaaagcttcagggtagaactggcatttgaattgggcgtgaaaggaaaatttgggttttaatgatgactatgaagtagggattggtgagagaccaaggacgaaagagtgtcattccaaatagagataaagcaatggcacaaagacaaaaaaaaaaaaaaaaaggcagggcagagcacgtggtagaaacagtgaatgttctgtgtgtgactgagcagaaatggaacaggcagaggctggaagttaagataaagtcaatatttgaataacatcagagttccctcctttaacctcaatttccaccttctactctcttcaccaagactaggaaaataaaagtgaacttaaattgggggccaaggatgacagtgtcaagaaaaagatacctcccaaaaataggttggctgaggttacctattttggctattttttttggaggggtaccaggtgtggtggtaccaacctcccagctactctggaggcgaaggcaggaagatcacttgagcccaggagctatgattgcacctctgcactacagggcagcagtatgagattctatctcaaaaaaacaaaaaaaaaaaatgaagaaagaaaagaaaagagcactggagcactgataagaccttggtgaagctgggtgcatgactggtggtattgccacagtagagtatgggcaagtggttgtgacaaattcaggctgggttcttgactcttgacttccatcaatttacttaaatgctctaggtttccatattgcaatcagtaaaataggggcaaaatctagcttcctcaagtgttgctgtgaggatctaataagaaatagaggtaagagttgagtccagtaatgaagtcggaaaacacatgagctaaggtgataatgatcataataagaataatagctatcatccattgaatgcttgttatatccctgatactgtgctagttcttttacatatcttttctcacttagttttatctatttctatagggaagacccaattgatgactcattaatgaggaaagtatcaaagtgaaaatgtactaggaaattaattcttaatgaatctgtcagctttttattacagggcatgtaaaatatctgacaaagagctgggcataaaatacttaattggacaacttttgataaaatattaacttaataagcataaataggttgaggatttttggagggcatgtgataataatagtattagtgtgatgtcttttgaaagtgctaagttctctagaggtcaaaaggagaggcaggaaaaggtgaaaagttttctctgaaagttatggggaaaccaggttgttaagacaacaaaatgggaagtcgtaaaaggtcaagttactcataggccttcttaaaataggtccatgagaaatgtttacagtgattggatgccagagaaaaagaaaatctctggcttcataaactgtaatttattttagacaaactgactaatgataaaaataaagacaatatgatggacttttgacagtttcattgaccaaactaagactaaaaagcctaaacatcaagatgttcatacttttaatcaacttcagaggtgagcaaagagaacatctgaaaagttaaggggcttttatccaaggtcacacatttaattagaggtgtgtgtgtgacataaacccatttctaaaattctcaagtcagtatctttacagaagtcaaatacgtctttgtcaaaaatagctttaacttacttccaggaaaaaggcaaaacaaaataattggagcaataatggatacagatataacagctaattcaagaatcccaaaataaaggtgaaaagtaaggaaattattagttaagataatctggaagtctactaaaaggggaatatgtttagagatggcaatttgggaacaatgtgtcctcaaaagtaaaagatcaaattacaagcagtttggggacctttaagagagattttatagattgaacaacaatttaagaataaaacaaggggctgacatgtgaacagcagcctggaaagtgttgcagaaaagccacatcactctaaacttcagtttctgtatatttggactgactggagggcgtgaaatcagttgttttaaaagcacaataaataatccaaccatctggcgaataatacaagctattctttgcacagacgttaatttatgcacttagacaccacttaaaactaaaattgaacaaaatacataatcttgatattattatataaaaaaaggaaagataacctttgccctgaataggcaggataaagatgagggcaaagatattcagaaggagagtattcttgaaaaaaattatattaacatctgttagctacatcagatttgaaatgcgatgatatacagaaagagaagtctactattgatttttaaaagggaatgtgttggctgaaagagagaagaagcttatagagagaccgaaagggttcttttaaggatatatttgaatgtcatttcaaaaaataaacacatttcccataacaatgcagtgaggttaaaagaataatgcaggtgaaagctttttggcccaaataaggtccatcagggctaggtattattgtttaacacaccacgacctagccctgcaagcaccaggctgtggctatttttacaagatccagtgcaacattcacagtatttctggcattagaacctggcacagatcattttgtttgcatttttgtgatgcctgctctactcagattgaataacccctcatttaaaaaactggaaaatagttttcttcatttagtttattctccaggttgagttttcctaactcttagagctctaaaattaatgattggatgtatattacatttacatttgtttttatttaggagttagccaggggtgacaatgtaattaaataagagttaatgacagatgccaaaatatgaataattaacagacaagttattttaatcatacatattatacaacaagatccatctgagaagtacaaatattaatagatataatttggttgcttaaaaagagtttttcttcctaccagtttagcaataagaagatttatgtaggctgggcgcagtggctcacgcctgtaatcccagtactttgggaggccaaggtgggtggatcatgaggtcaagagatcaagaccgtcctggccaacacggtgaaaccccatctctactaaaagtacaaaaattagctgagcgtggtggtgcgtgcctgtagtcccagctactcaggaggctgaggcaggagaatcgctggaacccgataggtggaggttgcagtgagccgagattgcaccattgcactccagcctggccagcctggtgacagagcaagactccgtctaaaaaaaaaaaaaaaaaaaaaaaaaaaaaaaaatatgtagaataatttgaagagagaaatcttttcatttttttctttgttttgttttgatttgtaatatatgtgaaatctttttgaggcctttggtaatacaccaagattaatgagtttttaactttgtgttgactagtatttttgttatttttaaatttttattttagctttaatcttttttgcttccatttatctttttatttaggaataatgtatttttctaagcatcataatatcagtgaagtcctcttaagtttctatttgttgaactctccttgactatacatttttgtatgtttttaattttctacatgtttgataagaacttgtctgtcttaagaacttttttttatttgccctatgaagataagatgtatggggatttccttgagcttaaactgagaaaaaaacctaatttttatatgaaaagacaaagactttattacgaagtgagttaatgttatatgtacatttgaaataatttattcacttcaaccagaccaccctgttcctaacctaacctccggattaatgtctaccgtgaagcacatacttctaatacatggcattgccttgtattacttcaggtccacagaaatttgttttgtcttctggcaaaaaagcattagctttttgcacaattttttaaaatgacagctatccaaattgcaagctggaagattgtgtatgaatacagaaaatgaaaaattttaggcaaccacaatgtctgggttaaacctttttatcatttggagaaagaatttggaacccaaagcccaaatttatagatttttaatgttattgaagtatattcctccattttatagataaaaatttgagttacagaaaatccaagttaaataagtttaacgtttagaactaagagtcaacttgccccagacacctgaataaacttgttctattatctcttaaattactattgtgtcctgtagtctattaattacaaatgcttctaagatttagtctttcaaagacttttataagaaaacaaaaatatattatttctgaaagcaaaacataattgtctagccagatctgcagactattaagataatttggagtgtcatccaagcagtgtctacttgtttattcttgaccttcaatttgacttgctcaagagtcgttaagagtgtagtaaggtatagtatgtacccttgagtttattaaacaacacgatcacaaacagactcctacacacacacacacacacacacacacacacacccctactctagagaatggaattttaagggttagaactttttatatgttttggatacagatggactattatttacttggcatgctaactaatgattctaaaacaattaaaaaccagcctctatcttaaaagctgatttctatttgctttctttgcatgggtgacatgagaacaatgatgatatatttataatgcttataagtcttaacacattgtgcatctttattttgtttttaggatacttagacaaattggaccatataccttattaatattaccctatcaacaatgtatatgatccatctatttcccaatattttatagggttttttttttttggtcttcccattcctgtgccagcttaattccttttttctctcctatgtagcattattgcattctttgagtcacttcacatgcaatctcccaactcatctctaatatttatttgtatggatttttgaaaaactgcctggattgttttgtgattcctaatttgtacaaaatagtagtgactacaaatcacatcctaggtcttaatttttcatgatataattatagttttaaaatacatctctgttgctgcatatgaacttaatttattgcttctgacaccatctcacattttcacataagttaataccaagttttacttatccattaccctagtgatgagaacgtaggctgttctcaacatttcacttccattataaagcaattatcaactctttttacatgtcccctctaggaacaggcagtttctctctggtttatactcagatatagaatggctaaggtagaagttgtatacgtactttaattcacgaattattccccagaatagcttcaccatttatctctcactagcagtttctctttaaccgtatccttaaccaacaaataatattagttcacattttaactcttggaaatctggcatatagaaattcacatgtaatttttgttttaattccacatttttgtgatgctaatgaggttgagtcttcatatacaatattgccatttctattttcccatctgtgaattgctcatccatgacctgtgctcatttttctaataaatgttatgtgttttcatttagatttgtaggtgttcgtttatgttcagatataaatccattattgattttttaatgttgtatatatcgtctacgtgtcacttctttttaaatctgactttggctccatttgttgtacataaatctataattttaatgtagccaaattcatccattttgcttatacaatatatgcttttatttgtttttttaaaaaaatctattttattccttactctgaaatcacaaagatatttgtttgtagttttttattctctctaaattttgtctttgacatttagatattaaactaattgaattttagtttcagacactgtgcaggattgtatttatagtatttagtagaatgatctctgaggaaaaactgtatgggtttaagtctcagttctgccacatacttcttaggttagtcattctactctcatgcttcagttttctcacctgtaaagtaggatactagtttgtgtctcataggatttctttgtgaaaattcagcaagctatataagacagtgcaatataagttgtatcgttaggttaggattcagctctgtgtctctttatataatgaacctctttccccaaagttggtaattcaacgttctcaacaggactatgatgctacctcttttgtgtacttcctatctttatatagttctatttctagaccatctgtttagttgcattttccatttctcacaacaggaccacaatgtttttaatcatcatgacttccttatgtgtgttttttttttcttttgagatgaggtctcagtctgttgcccaggctgtagtgcagtgatgccatcttggttcactgcagcctttacctcctgagctcaagttatcctccaccttcagtctcccaaataattagaactacaggcacatagcaccctccttggataatttgtgtattttttctgtagagactgggtcttgctatgttgcccaggctgctcttcaactcttggcctcaattctcctgtcccggctgcccaaatcgctgggattagaggcacaagctatcacacttggctcctaatatatcttaatatccggcagggcaagttctccgtcttggttttgctttcccaaactgccttagttgtctggagaacttcattcttccagaattaatttcaaaatcgctttttcacgctgtccttaaaaaaaggttggatttgtattggaattgcatttaacttatagattaatataaggagattgatattattagtgttacgttgtctcatccttaactagtgtgtatttcctttactcatgtgtcctttcatacagagttaaagtttttgctaggaagattttctgtaccatttgttatatgaagctctgtattctctatagtttttgttgatattacaagtgtatcttatattctatctggttattgatgctattggaaaatactattgattttagtatattgatcttttgtctagccaccatgttaagacttttttaaaatcagatttaatagcttattttcttgggtttccaaataaatgaatgatcaaaacatctataaaatgacatttcaatctatattctttgaaaccttatcccttcctctttctctctccctctccgtcttctgttggccaattccaatagataatgttaaacagagacagtaattttgaaaacctttattttgtttctctccttcagggaagtaataagatttttaaaaatattagcatggtaattttaattagtgttacacatatacataattttggtatatggccttggtcaaaaaaagataattcttatctggatctatatttataaaatgtttcctgcccaaaaagttttgagcttcattgggtggttcttatcccctatatctaatgaaatgatggtatgattttcttccttgatttaactaatgtagtcaatcatagtcatgattttctgatattgaactgaacttgcattctgagggataaacctaagtggccatattgattttgtgtaagttagcttttgttgcattataagccacctcacctttatttggcttaagatagcaatcacttgacaatttggggtgggttcaactgggaacatttttctcctggtttctcctggaataattcatacagtttcagttagctgatgaatcagcagggtgagatcttgtcagatgacgcctcacttacatctttcatggttgacttgggcaatgggggcacttgattcatgtataatatcgttaggatctgacaggctgctgggttccaacagcagcaagacaggtcaagctcctttgctgttatctcactgggcagctggaacaagttacatgctgaagctaagtcagtgctgaagtgggtggcccagggatgaggttgcaggaggggggattatgccattatttttgaaacatcctatcacattatttttaatattcttcaaaattctgtgaaataatattatactcagatttttggcttctatcttataagaacaatttgacttaaaaattttattcttattcagtttgatgtccttcttcaacctccaattctctctttccagactgggggcatttaaaataattgaagggaatagaaatgaatattacatcttagatcacatagacttagacaaatgggtcctatcatgcactgaggatgttcagaaggctctgatctcccagctgcctcttgaacccatatatgcatgaagcattttcaaggagtataatatacagtgtgtctcatttataccataccagcatttttcttatgtttttagctgctgtacaaagaattaaatttgaaagtatctccagggttgaaaaaaaagtttctctaaatataaattaaatttttaccttgatgcagtttttaacatccttacttaggtataattgatatacaaagaactgcacatatttagcatgtgcaatctgatgaatttggacatatgcgaacacccattataccatcaccacaatcaaggtaatagacaaattcaacacctcccaatattcccttaatgcatttttttataatcaatagtatgaaaagtaaactaaagatgggtacatttcttgagatgtattcttttattattattttagatacagtgtcttgccgtgttgcccaggctgtcttgaactcctgggctcaagcgatgcacccacctcagcctttcaatgtgctagaaatacaggcatgagccactatgcttggcctgttttttagttaaaaaatactaaattcttgaaaaaataaaaatacaaagtaaaaaggggaaattcttcatcgttcctgtctctcaccttcacaggtgaacctactgtaaagttaggatttcaactgtaaaaagtacatgagatgaaaatggtttgaaaaagtaccgtggagacgtgatcattaaagggttatgctgaacaagataagtaacagtctgatctctagttcaaaattattggcaagaagcggtgctttaacagcaaggtctaaaatcaaagaactatagttaaaactaaagaaaaagctagagattattgggtccaaattcacatttttcgtatcaggaacctgaaaatcataaatcatgaagtgatctctacttatttctaagtaattacacaatgctactttcccctagtttggccatgataaagagtggaggtagaaagaagaatgaaaagaaataaggccatttttgttttaaggaaccacggagagagaaaaattattgattttatcatttctgagagataagttcttttagaaacaaatgtctcattgaagtagggaaatataggacattatttagaaaaccacaacagtcctcttcattcaaccttcttcagggcaagcacacttttaagtttatttgtattacatagtattttagattataaaattgctttgtctttagaagtcagtttcttttagccatgtggggttattcttaatgtattgatctctctttccctctctgctttccctcccttactcccttactattagccagtaggaaagaagattacatatactgtacatacgctaaactatgcaataacaaaactaaaaaaatagctaatatcgttttgttaaagaagacaaagaaaataaaaagacaaagcaagcaagaaaatattccagctacagaatcttgagaaagtggaaagaatgtctgggtcctttctgtctttgagtagatgtgaaaagtagataccaaggtggcagctctctttctaatgtaggaatgccggttgagcctttattttgtttccaagacaacaatctgcttacgcggttctttcacagttatcttcacctttgaaaattaataatgatgaaaagaatactgtgtacttagatgatgtcttcttttcttttcgtctcatggactcaatgcacttaagcttgcagcaatgatctgtttaattctccggcaatcctgagagagtgccctgaaagggcagatgtgtttttccctcatttcgcagatgaaaaaactgaggttcagagaggctacatgactcagtcaaggtcattcattgtggtgatgccaacaccagaaataactcccctatttgcttgccttttcacaggtgattatccactggtccactctgactgctaaaattcactgtacctgtcctcgcacagagtccttgaagtgtccttttatgaggacactaagactatggcaagagtaatcagacacaaagaatactatataaaaagaccagtcttttttgttgactctatcccataaaatttctcagccacactgtatgagaaacatgagatgtctgttaagatcacgttcctattagaactagcaagaactagattttgcagagattaaagatatgtcttgtggtctgactgctgaagtgaatgctttgggagttagagatggatttctggctaggtaagtcaagaatgcccttttgcaattttttctccccatttcttagagactttaaattcatgatcgacatcatatattataattcagtaccattcatcatccatgttgcacgtatgtccaggaaagaaagttgcataagtcattaaatcctttcatgaattcaaaaacttatgaccctaggtttagctcagcaggtagtttactagaattattaaattacccctgttatggacatacaagaacatgacgtctgatttacctgtctcttcataaaatgaaaatagaactgagaggttagggcaaacttttgcatccaactcttgtagtcatctaaggaggtgatcatttattactactaagcctgccctttgattggtggttactccaaaatcaataatagtaaaactgtccaactctttgaagatgtttttctctctgccttctatccctcacgtgtataataaagcaaaccacccatttgcctttctaattatctggtgtcaattactaattggagtaagttaaatcttcccctataaactccttcaggacagacctgagaccttatttttcactatctttccagcagacagcatattccttgactcagattaagatctcagaaatgttagttagatgggtggatcaattgttggtccaattgttggtgtcttgcaggacagaaattaactaaaagtactgagatttccactgtatataaaaaagaaatgatttaagtcagggaaatatgccactacttttccttcccatgttcattacagtaattaccccagtctatcatgacattctttccctttgggtctagactcgatatcaggatccttctgcacaatataaatcacgtattcctgtttgatttcaattgggacacaagaaaaatcttgttttctatccatgatatataaattaaggaaaatagtaaatttttatgtaaaaatttagatttatagaatagaaaaagtagttttcaagaactgacctaatacagactttagggggcaaatttatgtctaattgagagcctttctagatatgattcctcaatggactgatcctccatatataaaaattctatattaaatccttatataggattttatctatataagatacatgatgtcagcttcctcattggggagttgggctgaaggaaaaaaatcaagaggtacatgggataattaaaaactggcatcatcatcaataagtagtatgtgaaaattaatatttagtagatagggtaaatggacaatgagaaatggagaggtctcacattgagtagactcatcactaatccataggtatcaccagtgtgccaatgtagcaatgaattagggtattcaatgctagatactgtaacaaaccctccttaaatccaggtggtatgacttaataaatgtttatttcacatggtggaggcaaatgtagttcaggcaattatttcttaacagatcaccttcaagtagtcaatcaggaacccatgtctcttccatcttggaatgttggtgtcttaaatacacagcctcctgagttaaaacagaaggggacacaggcagtgtgcaaggtttcctggccaagtctggaagtggaggacatatagccttttggccagaatgcaaaatcatgacctccacctaaatacagtgagcctataaaaggagtgttctctttagttgggctcagtgttctctttagtttgtacacatgtaggcctggctacatggaggctgaggcaagagaattgcttgaggccagaaattcgagaatgttctgggcaacatagcaagaacccacctcttaacaaacaaaggattgttctctgcccaggaagaggaaaccaaagcatctcattctctaggacacagttgaagatgggtaatctgtgacaaagaagagcaatgtttgcagatggtgacaagtgaagattgagaaagattgatttcttagtcatggaggagcactgtcccatctaacagagttctatattgcaataaattaagtcatccactagaaaccaccaatccagtacaaatatttgtatctaccaagcactgtaatagcaactgcaacctaccactatttttttcctgggccctggttgatttctagtatttggtatcaagacatgagcaattaacttgatgtgggcattagccccctcataggagcttctaatcatccttaaccaaaaacaacaggaaagagggcagatttatttctctgcttatgagaaagtaccttctataatctggcacttttttttgccacattcaaataattttttcttcatgtttcttggcctacttaatactattattaaattctccctcagcctttatttggccaaaatatataaccacattttcttttgccattcccttaaaagaatccttcttttgcttatttactttttagaatacctaatgagaatttgaaaatcatgtaatataaaaagataaatagtagaaatttcttctgggacttatgttccttcatccaaccagtttaagagcccttaccccttgacaactgttattagtttcttatgtgtccatcagagttttctgtgtatatatgcaaatacacatatgcatgtttcagaagttattatataataaaattacagaagcaggaaactggaaaaagtcatctcagtaaatgtttgtactacaagacaagtggtagccactagggaaagtaaccaaataacccatctttgctatttatttttcaaatcggatttaagaagggatttttcatggctaatgaaaacttctactttagctcttgcttatttccattcatttatgttttaaaacttttttgtttagtttcaaaaattgtttttagttttatttaagcgaagagtaaatcttccaaagttaaaaaatatcattcttaaaagagagattaatttaggcttagtggaattgatatgaagctaagaacatatgataatcatatgcattagacgttttcaaaatgatttgcatcgtgtcagccacattcaagtccatcgactgtaagaaaaatgattcggtaattaagttggctttgaagattgattacacttggttactaaataagatctcagtgttaagccagattctccctctcccaaccatgttccaaagaacactagttttatcagacagccatctgattgtttagtgctttcttcttaaggttattaagtattttgaatatcacctatgctcccacaggacattaattgatatcaagtaaaggaaagtaataaaaaagaattttataattagtgaaatatgtttgggaaatgctgcattagataaaattaaatatgtttcttcactacaggacttctaagatgtagaatgagctataatatgccctgtgaattttcatgtgaagtaggtgttggtgtgaagaatttttaaacttcatttggctatgcaaacctttgttggtggaacgttttaaaggaaacttgtttctagcaactttgggaaatgctgtcctactttcagctgtgccattgaaatcttagcagttggagggaggcccaccaacaagctcatccaatttccaatatagaaatcttcactatatccgtgctatcctctcatttggctgtggatgaatattttgataacagaatgttcgatgccatacagatcagctgattctatggttggaatgcttttctgttaggaagctttaacttcaatgtcttttttacagttagaaaattttaacttttaagagttcacttattggacatagatctgatctctggatttaaaaaatcccacttaagaaatttttattaatcatagacaaattctacctagaaaaaatgctaaaataagttataaatagtgatcaaagattgatttaaaataattttttagaataaattgtgatttgaaatttatgtcaaaataggttgttattaagtgaataaaaccacattttctgttgtgtttcataaattcaagctaaatagcacttatgcacaattgtaataatttaaaaaacaattacatgttgttttgagtgattattccaacaaaattggattatagcattattcccttccctccactgaatattcaacattagcagttcaaatcaaacaggattcttctggtaaaaattcactgaaggagttcatcagttttcctaagccctctcctaatcatttgatactcaaagaaatatatcttgtaactcctattgtgtccatttatcttttaatatatgtagctatatgtctttgccagatccccatttagcaatggcttcgtgtatttattctggaagatttctgatattattttcattggctttatcagtgtaaatgggtagctagatgatatccaatctgcaaaatttaggatttcacattgcacttatttgcattttatttcttttgtgtggtatgatgttcatatcttgcattcatcaatgagtaatcaactaaaactaaatgggtaggttaccaacttagaaaagttggaattttggggcaatttaaaattgtgaggatgtgaataatgaacacttggatgacaagaaatccgttatgtgaaaatacttaccagggaactttgccaatttgatgtactctattcttatctttttctagttcttggttacgaagttcttaactttccagtaatactgaatttctgactatttgcagacctcctcatttctgggtctagttataataaaccttttggtttcattctttattcataaagtgatgtttctagtccggccagaggttgttctgttcaagttttagagtacgcacagttttagtagcaaaagtaggtatgggttgtttgcaaccactcagttttccacctaaccctacttctgatcagcttgatgcaatagatagatagacaaccagacagaatgatagagttcataactttgaccaacaatctgtgaccttggccttcttggcgtgccatgccttctcaaaaacagtctgccagataaaatatcattttttctcttggtattcaggatactacatactcctgtctttaaaaactccctcccattataactcctcatttatttctttcacacactgaacatccattcacctgaactacatttaattacctgtggtacgaattgttttctccttttctgttccaaagtatccccatttctctgcctagaaaattccttcatgttattcacaggactgaatcctcctttgccttcaagtactttagaaaatgctattctttccaggatcaacatgtcaattaatcaataaaccattagtaggttcataagttgcttcaatgaagttcttcaactactaaaaataaagttgtcaatctttagtagtgatggttatattgcttccacagtcatatattctaaaaataacttacttcattttatgctctctaaaatgatattaaaatattcttcattgttttagctattttcacaatagctttcatgatagctatttaggtgtttttttttgagaccgagtcttgctttgtctcccaggctggagtgaatggcactgtcttggctcactgcaacctctgcctcccgggttcaagtgattctcctgcctcagcctcctgagtagctgggattacaggaatgcaccagcacgcctggctaatttttgtatttttagtagagatggggtttcaccatgttggtcaggctggtctcaaactccagacctcatgatccacctgcctcggcctcccaaagtactgagattacaggtgtgagccaccgtgcccggccctattttcacattttgatatgtctatgataccagtctcttgaagacataaagtatttattaacaatttttttcagttttctagtattttgccatgtttttcatttagtggatgttcaataaagttgacttcaaaattttagagagcaaagaaaatttccctcaatcctccccatctctattcaagaccagtgtggcccctatcgttctttgcacaacattatttggttataacagctaggccgatatttttgacaggaactcaagaggacaaaaagaaaattctgcatgtattgagactgaagctgatgtatgcatttgcttcaagacttattccttattgctccaggactaaatattccttacttaggacttactgctccaggtccttattgctccaggactgcatggtccttattcagcattataaatgtattcttaaacatatgtaataaagagtcacgcttttatgattttgtgatgaatcttatataaaatagtcatccatatttacaaatacttttcagagtgcaattcttttgaaagttttatttttacccctctgtatacaacaatcatttcacaattaaaaagagccaaaataacagtttttggtggttgtcgttgctgttgtgctctgctatgtttttgttttatcccatgttgtaccttggagatgatgggcttttaaaatctcatgtataaatattgagtttttacggtcacttggatggcagatataaataaatgtgaatccttacaatatttctaaattcttgattttaaaatgggaagcacattctcaacgttcatcttttcatactgtcatcaaatttcttactttaacaaaaatcgcttggttctatgcataccaatgaacctgcatgttacattttcaagctcatgctaatatgttctttgcaaaatacagaaactttctttctatgtattcattgactttcactattcatcaaggtggtataaatgcttaggtgatgctgaccaaaaggcatctaaattcatggaaatgaatgtgaaaatgggacaacagaattcagtatcacaactaatgggcttgatactctattttacctttcacccaaacataataacagtaaattttttttaaccaaagactgagttctatgtgtagttccaagaagaaatattatgcttaatccatcttttctttcctagcccatgagcttcagcctatgtggataatggcaaagtcagagtttgattgttttctgtctgttctaatcagtggtatagacaacaaataagaactcagtttgggaagaattctgggagtagactcagagtaaactttcaacaaggcactatctttgttgatgttgcagccaaccaaaatcattgatctggttacatatttatttgttcttacaaagtcctgtttttgtgcattcagcaaatttcctgaaggctactgtgtgtcagacactaaagatacaataatgggcaaaacagacagagctcatgtagtcatgaatcttctgttttggaaagcttgatggtactaaaggtacccacaggaaggaccgattcagacattaatgaaacagtcacacaaatgtaaaatataaaataaatatgtgatgccataaaagcaagtgaaaggagaaccaacattatcaggagttccaagaaagacttttctaagtgctatttgaactgagaccagaggaatgcattaagcaagtagtggcagtatagggggagtcactgaaatgagcaataaagggatacctttgactaagtaatttataaacaacagaaattcatttcttagagttctagaggctgggaagtccacaatcaaggtgccagcagattcagtgtctggtgagggctctcggcatcttgggcaccttctatgtgtcctcacatggtggaaggggggaacaagctgcctcagtcctcttataaggacactaatcccattcatgagaactctgccctgattatctaattacctcctaaagaccctacctattggactggtgattcgatttcgacatataaatcttggggagacacaagcattcagatcatagcagaggtaaaactttattaattcatttttttttcattcagaacctactatgtgtctatactattctcaatcctgatatgtaagaagaaaaaaatgtttctaagaaactgaaatggtggctgggtgggggcagaaaatgttgcaggttgagatggattcaaaacaatcactgttaagtaacccttaggagttttcaaaattcagatatagatgtttcctttttattgggaggaggaggtgcagatactgcctagcgattctattcagaagaatcccagccatgccagtcactagttgtgtgacctcaggcaagttacttaaagtctttgtacctcagttttctcaactgtccattgataatgttgataataccttcattatagatttgggtgagaatttggtaagaggttaggactatacccagcatttagcgtctatataaatattatatattgtagttatatggtattgttgctcagtttgctaaattagatatagattgagaaaaataaatgtaattaaataatggtgaatgttgactgtagatttacttaagtaaattgtaagtgataaaacttttcatataaggttaaataaaatttagatggggagacaaaaatgttggaagaggcaaaaatgatgatgcaaattgattgaaatatatgtattataaaatagcacctaggaaaactggaaatcaatgaagttttgttaattgcttttttttttttttttttggaaagagaagatggatgtttgtaataaacttaaatgaaagagttttaaaaatggttccctgggaatgcagaggcacaaacaaatgctcataattttgtggcttgggctaaagcatttctcaaatgtccttgaaagttcccaaagacaatctttcctcaggaaagtatttctcctgtgagtaaataatgttcttgcctagaaatgaaatgtagtaatatattacattgcaactgaattgatagcaagactggcagatgaagttcagaaaaaaatgtcacattggaaactaggatttgaggctcatatctatattttcataactccttaaggggctccctccatagtaaatcaaaatagtacagaaagaagttttgactattctttacctcttcattaaagggatcaatttggaattattattgcaccaataccatcctgccttaaattttgtatggtttagctgcacaattgataagctaaggtttcttttcaccatataaaaggtcctttttaagcagtcatataacaacgacatttaaaatatttgcttgcttttaatgaaagctttgtactttccaaagtgctttctaaatgcatctctgtgagtcaggtaaaacaagtcctgtcaacagtattttacagaagaggaaacaaaggctgtaaaggaaagcttcttgctcaaggtcattctgtgagctagacaaggacttcatcacaggaatgactcaaagttcaggagggaatacagcagggaaagcttaagccttcagttcatttttacacgagaatttttgcctatcgccttgtaggacgacatagggaataaactgtattaggtacccagttcctccttcgtgttacttaagagtctggtgaggtatttaggttggacgtattctgttctaatgaagataaatttgacatcctgatggctgatcccatgtgctttagaatttgaatcccagctccatcacttactagttgtgtatccttggagaaagtttcttaacctcttgatgcctgtttccccttccattaagtgtcaattttaatattatcttctatgtttattcattcattcatctaacaaatattggctaagagctcactacatgtcaagtactctgccaagaatagttaagttccctagagtgccagaaacacttttcagtggatagcagaagtcagtagagctgagaagtaaggttgaaactgaccttaggagaagattaaaggctcagataataggagaaatgactctcacacacttccaggatgtaggcctggaggtattcggagccatggtgcgttgtgattttggacatactgcacttccagtcccggtttccaaatctagagaatggattgattcaacatacctcacagagttaatttggtagggattaaatgagggaacatatgggatgtgacacaggaagcagtggataaattattacatatgagtatgtttgtaaacaaaatcaatctttatggccccgctgcatagcaagtgatcacagcactctaattttctggttgagcctgacattgacacatcaggcagatcttactttttgaatcaatggaaaattcttgcctcattggtctaatgtcacttaattttggttctttatgtatggagacataagtaaaggaaatcttaaaataaatgtattttattttattattttattttattttttgagacagagtctcactctgtcaccctggctggagtgcagtggtgccatcttggctcactgcaacctccaactcctgggttcaagcgattcttctgccccagccgcctaagtagctgcgattataagtgcccaccaccatgcctggctaatttttttttttttttttttttaatagagatggggtttccaccatgttggccaggctggtctcaaactcctgacctcaggtgatccacccaccttggcctcccaaagtgctgggattacaggagtgagccaccgcacctggccagaaatatattttatatcttatgcttcaaaacgtagaaaaacattattgtattgttcatcttttttttttttttggacacgctgatcagctagttttttcctctgcagccaggcaaaacagaatctgaagaaaacactttaaaattttgatttcaaatataagatcatggggttctttccctactcaacttagattaatgggaatcatcaactttagggttttaatatggataaagataactatcgaagattctaaattatttaatttttgatattatatttaaccatggtaggaaattaggatttgactaaaacatactccttccttttcctgtaccttagctttttcatacaggaatgtgcctgttccactttgagatgctcaaccaggtgaggtgctaaaactagaggtgaagcttagtttctgcttattcattctatctgaatgagatggcaattattaagcaaatgtttgccatacaatttttataaagttgaatataacacagtggttaagacttagggagacaaagctatcttgtattcttttgctctgccaattgattaatatataatacatataaccagcagaagctgtaaagtatgatttaaatgtaaggcataattttctcatttatttcaccttaaatgcatttatactctttattatttatagaagagttttgagattgctaagctttaattagtgacatagcaataataaatttttatcaatccctaaattaacaaaaatgatgattgatgggccaggcacagtggctcacacttgtaatcctagcactttgggaggccgaggcgagaggattacttgaggtcatgagttcaagaccagcctggccaacatggtgaaacctcatctctacaaaaatacaaaaaattagctgggcatggtggcatgcacaagtaatccaagctgctcaggaggccgaggcacaagaatcgctggaacctgggaggtggaggctgcatgagctgagagattgtgccactgcactgcagcctgggcaacagagtgagactccatgtcaaaaaaaaaaaaaaatgatgattgatgacttttcccacaaatattggataatacctctgcagatcaagtcaaattagttaagtgtctatattttactctcatgagttgcccagttaaatccccagcctgttttcattcactctaatacccatgatttccactgcttggggctgggtctccttctccttttggatgcctgggtttgactgagttgtacttcacgagctgctgatagttacctgagaagggccttctatatgagcttcttgtatttcatatattatttcattttgcttcactggacccagacatgctcttggaattgtatgtttccaaaaatatcaccagcatgtctctagccaataggaagatcatgatctaaagatacatcttagattatcagaaccttagagaaatctaaagaggcaaataattttaaaatagcagcatttgcttctggagactggctgacactcttatgtgaaccagtgtgaaaatgacttctgaaggcatccgtcacattggcttcgagaagtctgttccttcagcaaatgtattagtccatgctgcatccccactttggcttatctgtgtggtttggttctagctcccagcaggaacaaaagctgccgagaggcaacttgtttggcttgggagcatgcccaatgtgaaaagtttgcaggcagaatccgaaagagcagctgcaagaggagagatgggggtaggtgacagctaatgattcagaaagcaatttccatgagagccttctgctgaacaggaggcagcagtgcccgggagatagtttaccatctaatgccgggctggtttcaataagccaagtcctttttctgtcagtacctgtgccccgagggaaagcgcagccaacagcttctatttacctgaaatagtaggacacactaattagaatttcaaagagcttacatctattaaaacgtgtggatccattttatcctaaggctcaggatgcccagcctcatataaactgatttaacaacaaacgtttaagtacaaatccaaagccatctatctagtattccttcacaacttcttgtgtaccaggctctgcactgtgttgctttccatactgtgtcttattgagtaatagacctccgaaatgggtgttgaaggttcctaccaagggatctgtgtacaagaaaccatagccaggaaagaccaaattattatttgttaaaagtgagcttggccctgttatctcattttggaattcagaatggcttctctctctctcctctccccccaaatcacagatgactagaacacaggacaagcctaagctaatatgatttactcagaatcacagaccgagatgctgggactgactgtgtagcacacttgccactttctaatacagtaactcctctcactgctcaatagacgtcatggttgttggtcaataaagatcacaattcttcttccaggaacaggttggagggccgtggggttaggttttcaattccctcgcaaacatttgacgactaagcatgttccgagcacgcctctttctgacatgcttgattcctttttttatagatgtgcaactgaagcagaagctaagcgacatcctcagatcacatagcccatgcttttaacctatcatactacttaaacttcctcacctgccagtttactttttctcttgaagtctgagaaactgaacacagttccagatagaaatgaacaaccaggaagacgcttgaaatgctcttatttttccattaccgaagatagtcactttttttaagtgaagtcttctagctttttcgtggtcataagtaactaatgatatgcttcaattgattaaaatggcctagcattctccaactgtaatacttcatagaaagttggctgttatatttccctaagtcctatgcatgtttctagagattagatgctgtcaaatagctttcttgaaataaatacaagattctggtttttaaatttatcacttcttttactcttgcagtggctttttttgaattgttggacatgatagatatgggaaatacttcattagatcacaaattttagaacctataacatacatatagaacagaactttaaacagagattagaggaagctaagttactagaaaatgtagtataaatcattattgaaatagagcttaacacattataattcatctgaaaagaagctcagattatgattgtcagttatttaatgttctgttcaaagataatgaaaacactgttaaaggtatggtattttgactgccattggaatggtctgatttcaaacagcaatgcattagttgtgcttaaatggataaagaatgttgaataagtgaagagaaaataggagaactgcattctaatcttatcttggccactgacaggaataaagttgacttttaggctatcaaacaaacattttcttttcttttcttgttttattttctttatctttttcttttttttgcaacggagtcttgctctgttgcccagctggagtacacttgcggaatctcggctcattgcaacctctgcccccaggactcaagcgattctcccacctcagcttcccgagtagctgggactactggtgtgtgtcatcatgcctggctaatttttgtatttttagtagagatggggtttcactatgttggccaggctggtctcggacttctgacctcagatgatccacctgcctcggtctcccaaactgctgggattacaggcgtgagctaccacgcccagcccacacgaacatgaaaaaaaaaagctaactcagttttctcacctgtaacatgaagaagtggccatttaaaaaataatagttgattatctttagttctgtaattttagaagcatcttgatttgatttatgcataaactctcacaagaaaaaaatgtccttttatttctaaaatgtctgtaacattggattaacatagcaaatgaaatcttttgaggattgttcaaagggtcaccaatttagaattcatctcctctgttggtttttattttttgttttaacttttactatatctatgatagggtttttttccccctgcactgggactgacagatggaatggttaaagaaacacatcaacacttattttagatactttgttatcagacccattctgtgaactttgctctatccatgaattatttatttcatttgatgtgtttttccctggattcataaaatttcattttgtcatgatgtttcttcccgtttatgggactataaatgcagctgactaaacctctttaatggctgaacacatatcatgtctttgagtgaaggatgtgatttctctttctgttcacagacatgttcacattttcatttatttgcttttcttctgttcactcatgacaatagtgtcagtggagaaataaaatgatgacatctgatacttatttaagttggagtcagaagacttgagctttctctaactttttagatttgctagctttatagcaatgtgtacctcacttgttttctctgaatctcagttcctcttctataaaatgtgaataattatgcctataacacaatgtagttagaatggtaaacagaaaagaaattcttcccatctgctctcgtgttggagaaaaataattgaactgactttcatcagatttggaagtttgcaatggtccgtttgaaaatattagctaaatgggatactgtgaagaccctctgaaggcacttcaaagagatagacaaatatctccaagatcatcaaaatcaaagataaaatgagaagcattttgacctttcatcaggagacagatgatgtataatttcagtagttcttaactttggctatagatggagaatctcttggggaactttaaaaaatcttaaagcccagacagttacttacaccaattaaatatgaatttctggggctagagagttgcaccaagacattggtatattttaagactcacaggatggttcctatatgcagtgaagattgagaactctacatatgttaagatattgtggctaagtatcacaaaagtggatgttgtcacagggtagttctgcttcttacatgggcaactccatgccaatgagtagcaacatgaattctttaaaaattttacatagaagccagttttatagatatatataaacactgtaagaggctaccagacattaattaaagaaactcagagtatgttagcattaaaagcatatctccaacacaatgtcagtagaagggatggaagggattctggggctgtgatatggatgcctccatacctggatcattgagagagagacaggaaatatctccaaatcactgaaattttcagaaaagcctgtgattcttttgggagtcatgatattagggctcatgacccttgactcttgtttcataatatagggacccacagttacatacgaagtctatacctgaggcttcttatatggtagaagtggaaaggacaaatattttttactgaagaaagaaaaagagatatgagtggggagaatggagtaaagaaagagaaaagcaaaagtaatccatctagagaagacttacttttgggcaatccctcatcgtataatcatgtgtatttcttccttccatttcatgctttactctatataggcatttaatagtttgtcttccacatattttaagttccattaaggagattgatgtctgctggcattttgttttctggattccaggcacttagcaaagtccctcaataagcatttgttgaatgaatgcatgaattaatgaatgaatgaatcaatcaatttaacttcaaactcagcacccttctcaaaagagttacctgctttataccatacttgagaaggttacgttgttttatcattaggccaaaatcgaatcaatcaatcaatttaacttcaaactcagcaccctcctcagatgagttacctgctttataccatacttaagaaggttatgttgtcatatcattaggtctaaaagagaaaccaggatcttgattttagaacttgaggtcatctcttctatcatctcatacaatgtaggaattcactctataaaccaggtagtggtcatctagtctcattttgagagctcttgtgatctgaatgctctagttgatgatttaactcatcctgtatataaatagctatagctgctatgaagtccttccttatatctgcctccctgaagcatcttacccattgatcctaccttgtcctggtggaactggaatgaaaaatattccagtctcacatacatacattggcacttcagatatttgtagcccatcatcacatccctaaagtcttctcttcgggtcaaatattgtagtgtttttcctataaatcatgtgagagtatgtctaggctcctcaccattttgtttatccctgttttcactcgcttttgttttctaaagttacttcccccaaattgtgctcagactgggatttcgtgcttcaaatgtggtccatctgagaaagagggaccccccaaaacctcccacacacatgcacgtacacccaaggaaaactatatttctattaaatgtaattcttatgtcataaaatctatatatgtttatttaaaaaataaaaacaatatagaatagcataaagaaaaacacaaaaatccttcagaatagctcattagctaaagacaagccctttcagattctttcatatccattgatctatctgcttttttctacatatatcatttgtgcattcatttgtgtcaacatcacataaacacacatgcaaacatatgtacataattttacctaaatagaaatatagtgttttaatcttatgttttaagactgattataagtactgagcattattacctgacaataattttagttccacattaaagtttgcaaaactcctgaatgttagctaaaatgcagcccacagatactttctttctaccctccaagacctgcacaacgttttaaaagccaggacattttgcagcttctcctgcgaagaggataatctggtgatattgagtctgtagtcttacaaggatgtgatggaaactgaaaggcaggtgtctcctctacaatgagcaggtgctccccaaacagcttagccattagcttggcctgtttcttgcaaaaagccgatgcaaccacccctcgggttgagttagtgtcccctgaacatcaccattttaataactgtagaactatatgcaagggataaaccaggattgatttcataaatctccttttgataggccttaatgttggttccatattttccgttttgtgaatagagttgcggcaaacatctttgtacaacatatttacccagatacctgataatttattataatgaaattctacactggatgtaaatcattgagccaaaatagacttttagaactacttttcttctttttatcatagtcaggtccatggaagcagcccgcatctttcactcgcactgtgttaagcaaaatttgaccactgtatatgtagacataggtaaaacatagaattgttcaaacttcatgttatacaatttaaatatgtgccataaaataagtaagtagaattgttagaaaaatgaagctgggcatggtggctcattcctgtaatcccagcactttgggaggctgaggtagacggatcacttgaggccaggagtttgagaccggcctggccaacatggtgaaaccttgtctttactaaaaacacaaaaattagccaggcatggtggtgcatgcttgtaatcccagctattcgggaggctgaggcaggagaagtgcttaaactcaggaggcagaagttgcagtgagccgagatcatgccactgcactccagcctgggtgacagagctagactcttgtcagaaaagaaagaagaaagagaagaaagaaagagagagagaaagaaagaaagaaagaaagaaagaaagaaagaaagaaagaaagaaagaaagaagagaaaagaaagaaagaaatctagtagttaaattaggaaaattattaaatacagaaaaatttagaaaaaaatatactttagagagaataaatatcatcattgctattttttccactattacatgcatttatgttcatatgcatatgtaaatctactcattttatacacagtttaataatgttaagatatgctgtttatgtcatttttatctatattacattttcaattaacatcataacatggccatttcccatatgatctagtgttcttcatttagataatttgtaagttgctgaatattccaatatatggggtcacttatttaaataatctcctattattcggcacttaagttgttcccaagtttttcgttttacaaacaatgttccagttagtgccattgtacatagatttctgttacttcttctggtttcacacttagaacacatttctaaatatgtaatcactaggtcgcaaatccacttgtaactcacataggcaatttttcagaaatctaaatctagaccttcacatttgaaattatttcagttatatcccttttatctgttttgctccttttttttttttctacactgctgaggtaggtattttaacacatccctcattgatcctgttgcctcttccaagcacgttgcttggtttgcattaactgggcattttcccaaaatgtcccttggaattcccccaaagatagttgctcaataccactctctttcccaggtactaaaaaatgcagttgtaatgacttgttaacttgtagatatgattaagccccacagttttcccatgaaagtttactatttggcactggtcctgcaggaaggtggcaatgttactcacacagtgaatttgcattgatattcgatataggcatcatggcatatgaggaagcaaaatctgagaaaggatttaaatgtgaaagtcattatgcaaatgataaatattatttattattaagtataattaatagttgccaagcagatgtttttcctaaccaagtgccatataccttttaaaataaatgtttgtaattaataacatttagatagggggaaaataagtttttctcaactttttcattatagcccagattttgccaggcaaacaacttgatagaatcaatagaagcttagttaagcaggtgataatcttctcttggcctccaatttatcactaaatggcttttccatggattgcaatcattgaaaggttgtaattgtagccttctgctatatttactgttagaaaatgttcttttaaattgagcacgctgtgggtttgtgaacacttgtttgtcattcatgatgattaggttcccccatatttgaactggtacataaaatgccagtcatagtgttttaaagtgatttttccctcggcagttttgattagatgccttgggtcagtgcttagttaatatcttgcaccacttggcttctgtaagcaaatgagagagctgaacattccacccacgacctgcttggaaagctgataaataattggaaaaggacagtaatatctgtaagactttcaatctgttccattcagtgtgatattggtattataacacaagccaagttgtcagtaaaaaatcacagtcaaagcattctgagtagttgacggaggtgtgagaaaggagtatttcagttttataaagatggttcctctagctggcaagagggcgcatattcattttttaataacacacagagcatccacccctgctccttgtccccatgactattctgtttagacctccatgccttcccaactgcctctcccctcttagcagctgctcatttcaggacttgctttggaatatctactggagacagcactgaggtgcccaaaattaactcagaatccagaaactagtgaaaggtatgggaactaaaattgaatagttataaggtggtaccgtgttcatgaagatgatacagtagcagactgcctgctgtatatcacacagtaggtatgctgtctttttactttatttttttttcccagggacaagagaatagaattatgtctatctgttcatgcttgggattaccagtgcatattgtctacaattgtaagataaaactagaggacaggtattgatgcagtctttgactgtcaataagatgcatataacagataaaatggggcctacacccagccctgtttacaatgacagacttgttaaaatgagcatctatcagaacattaaaaattgattacaatcctaagtggcctggaggtgtgtagggaaggtgaaagatgctgacggcacacactgtccaggtgctgtcagaatgttttaggggctgatagagagtatatgccctgccatggatcttttccacatcagatgggaacaacgcttctcctccggagatcaatacctcatacaaatttttacaaggcagaccccacaaacgtggtgtctggagtaatcatttgattttccccaacccatatgtggctgtggaatgaaataaagctaatgttcaggcaaacaaagggtattgaaaatgatacatgttctggagtgagacagactgtgtggcaatcccaaccctactgttgacttagttcagtaaattgaacaagttctttatattctctgaactgcagttgccttgtctgtaggtggaaatagggtcagtccttgctgggttaatgtagtattagagataatatatgtgaaaagccaagcatagtactgatattaaaaagacagtaaaagcggtagctgtttctataattcaggaaaaatgttatatctgacatagaccatcctaaagtgaaacaatgttcgataaaacttactggaagaacatagagtaggcaagaggtcaaacgattgcgtgtctatatcctatgattataacacatcaaattatatccaaataggttctcaatatgtagtgtaggcaacacatttccaattaattataagaactaagcctttataattttttggtgtcttagtgtttgatttttttaatcttaataatgtattagagtgcctctgagtttagctcttactaaattataaaggcactcattttagacctaaatatatggttcacccaatgcaggtggggaaaaaaacaaacatttttggcagactgactctggcttgctggggctctgttctcagttcacagaccaaggagtatcgtcagccagactgataggttgatcatttctaagtgtacttggtttagatcaagatgtcaatttccagcagcaataggcacttgcagatagtctcattttcttgagcataagaatgcgtcttttcctatatttttgagaatatactagctgctggcccatgtaaaaactatgaagttattaaaggacactcaatgcttcccacctggtcatttttctcaccttcaggagtagcctcaaatgtgaactgcctccagttactgggatgccccatcctttcccactgtcattacctccacactcataatcgcttctatcaattctagcacctaaaggagccaggctttgtatccatttatattgttcactttatattagctgaaattgcactagctcttgcccctgtcaaatggatatcaatctttcattcattagttaaaaatatgaaccacttaaatcaggaagtgcaagacagtatcatcttgagggccttttttgaatgattagtggtggctgcccagaaacactcataagagaagagttcagaacatgtcaaggctttgtctagccatagtggagaatgccgtgacttactagcaatgtctgcccttggtaaaagagaaaataatagaaataggaagagtgacatagaggactgaaaggatggccactctcaggcttctcatccttgctcttagtgcccttcttggagactgggatcatgttcccaccttccattacgtggctgtagagtccatttccaaactattcatttgttccttcaatttcccattaattcctgcccatcctcctgactcagaaacttcatgcattctgttccctcagactggatgctttgctgaggatcccttctccaaagtgccccctgcaagaaggctctaccttatttactctaagaaacgacaccagtttgttgtatgttgtagcactcccctcttttgtgccatagaaattatataaatttgtaattattccttgatatgtttatttgtgtatttattaccccctgcaccaaatgctaaactcagtgagctcaagaaccgtgtctctctttttggctattccctcatactcagcacagatgcctggaaggcagtaggcatttgaaacgctggaatgcattcaagtttggggattccaacttaatcaaataaggttcctgacttcctacatctcatattctagtgaagaagaaagtcgattaagtaaattattatgatgcaatgagacaaaagcaatacaggcataagggaatattgctgcgtgggtagggtgacaggtgtagagatagcatcacagatgtaatggtaaggttgggttttgaagagtaagacttaaaaataaacctcaataaaatttctgtgtaagaaaagttaaacactgcaacaactgctctctatttgaatgttatgttctaccattgaagttttatttgtgaatcgaatgactagatattttaacatgtacctatagtagcatcctaaatgcattttaaaagaaatataaaggatactttgcctaccgagggcccacaattaggcttttcctttaaggatattcttagtcttaaccctttatcctgctttgtacttgatatatccccatttattctgatcgagtagcccagatggaagctttttgtccatttgcaaaggtcagtgggggttatgtgagcatgagtctgctgaaattttaagcaaaaaatggcccaagcatttcttatagtttggggacatgtagttatagtgaaataatttagataaatgaaactggacttgtcttttagatttaaaaacataatttggggataataaaggaaacatcattactagtctagcaagggatatttaaaataaaaggtggttttatgtacgctgctaactttcttacagcttcaatgataaattattagatattatgttcatcatatcgggaggtcacatataactttccagttgaagttttttagaaattggctggaattttttgttttgtttatttttttaatgttttcttctttctctctttttttttttttttttttttgagacagagtctcgccctgtcagccaggctggagtgcaatggcgcgatctcggctcactgcaatcttcgactcctgggttcatttgattctcctgcctcagcctcctgagtagctgggatcacaggcacctaccaccatgcccggctaatttttgtatttctaatagagtcggagtttcaccatgttggccaagctggtctcagactcctgacctcaggtgatccacctgccttggcctcccaaagtgctgggattgcaggcatgagccaccgtgcctagcctttaatgtttttataagttagaaaggaagagagggagggatgaatgaagaaagaataaagcaaaacatttccttaaatcacatttaaaataaggtggagtttaataaaatacaggaaggaaggctgaaagacaatagttattataagccaaaagcttttacaattatattatagcacttgagagagaagtagtgctttttgttggcccctatgatttccccaaaacatgttcattctccttgactcaatcatgttcaaaggagagtttccttgttaggttggtaaaacaggatcatatccaggcttaattggactctaaactgattgtagttctgtataaacctacacatcatgtatacatagaagcagaaacagtatttaaatccaatagatgctgcttactttaagatgaaagacatctaatgaattttaaagtggaaaaatttatgcaaagtcaactcctattgtatttgaaatacgggaggacattgatataaaatgcaacttgcaacttgtttaagataaaactaaaatagaagcaaggataactgcaagccatgacttgcaagatcaaatcagaacttttaagtcctctccttgaaagaataaagatcagttatgtgcctaatacttgttttgtaatcaggccacattttaccaaatctggcgagaaaagaaaattaaaaaaaaaaacaaaacaaaacattgccagttattctgagtcaggtacaaaactgtgccagagtggtaatcagggcttgatcctactattcaggaaagaataaaccagaatagtaactttctttcttttttagttagccaatacaaatggtaggaaatattgacttataaacttttgttcaactaagtgattctctagagaaggaaccaacaggatcagggtggaaagttaaatgaggacaaggttgggctaagtgagggaaagtaaggagctttccgagctaagacagttccaatgtgtgactgacaaactcactcatgagtatggggaggttcatttttcacatctgccagtatacaccatggtccattcaataaaaccagggtagaattgaccactatgtctagattaattataatctattattcatccattcactagggattgaaggccttgaaactttcagtgtggtatttaggtactcagaaaatctcccttgaatgaatggatgagccataagaaaatctgtttactaggagacacacagtggtattttctatttatttttttcattcaccatttcacaatttttaatatcgtttctgtaccagggctgtactgggcacagatacaatagtaaggtaccatgaaaactgccccccaccctgccccatctcttcattacattaggaaagaataatattagaaaacaaaaccaactagagagtatatcattacaattcggagttagtttatcttaaagattatggtgctcaaagttaccatgaagacattagaatgagtgtatatgagtatttgtatgtatctataggagggtataactgcatatatttttggaagagatttgacagaccatgctagtggagaacagatatagaggagagaagagcaggggtggagatgactcggttgttgtggtgcaggtgagacatgatctagtttaaatgaggacggtggcagggcaaggtgagatacttttcagttcagaaacatatttaggatgaaaatatcaatagaactagatgaagtttggattggtaggggaattttgagaaggactcctagatttttgcctcacatgatgtttacattatgccctgagaaaaaaaagaatattggaagatgacagtcttcccccaaacagaattatgttgcgaaaacaataatgggctaatcatccctcttcaaggttctcagtgaacactaacattttagaagttctgagaaactcagtaacatttaaatttgttcccttttggttcattgatcattaccaaaacttatttcatcttgcatcccttgccctcggcactaaccctagaacaaacatgaaaacacagttgatttggaaaactagaacatgattcatgttatgtccttagttagagggagcatttcatgtagtagaatgaaagagaaattgttaggaacaattaaatgattccttctacttgattccacaaaatcagtaagagttattgattatgccttaaatgtgtactatccacattgtacttatgttcactttatgactaattaaatgtaaaacaacattcactgaatgaaaattcagtttattgtaaagctgctaggctttttttttttgaaaaggaagtctatgtattaacatttacatcatagaaatatggcaaagctcaaagaataatgaaaaattaacctgaaatctcccaccctaagagaaacattgatagtattttaatatatattctttgtgacagtttctggtttattgcccctcaaggtctaaattcaccctttttacctgctctgtgaaaacagatctgagccttttacatagtatttcctttgccagctggcatgatattatggtttaccaacagatggcactggagagacattgcagaaggaaaggctttgatttctgtttcttatttttaaattattattattattattattattattattattattgagacagagtctcgctctgtcatccaggctggagtgcaatggtgagatcttggctcactgcaacctccgcctcctgggttcaagcaattctcctgcctcagcctcccaagtagcttggattacaggtgtgtgccaacacgcacggctaatttttgtatttttagtagagacagggtttcaccatgttggccagccatgttgaccaggctggtctcgaattcctgacctcaggtgatctacccacctcggactccctgattgctgggattccaggtgtgagccaccactcccagcctttgctttctgtttctaatgtgcttgcttggaagtctcccagaggcctctccagtgtccagctcacaaagctcggtgactttcccagcacccagctctgcaacacctgtgatttctccagcattcaaggttcctccagcacccagctgtctcagctctgaggtctctccctcggtgttctgctcttgcagtgcacacaactcccatagctggcttcagcagtagagggcagccagcagcttctcacaggtcccatcaagaggttctgtaatagagtgtctttggtaagacacctccccataaacagcttttcctggaagcctagagggtggttttccaataagttccaaagagcctatttctggatcccagttgtaccggtgtggcaccacagaaacttctgtgttatccaatgagccacagtcatgctctctccaactaggcctggatttcttcttagcctgagggtaacttgttattcctcatatctgctactcttctatttttttgagttctctttacttatcaccattcattctctcattactctaattcctggatgtacttaaaaattcttttttattaaattgtttatgctggagttgttatgtgatttttctctcctgattggacccaggatgataattgattagtcttctaatctttgtgtgtgttattttaatgtttaaaagaatcacaagtcccctttccacgacattctatgagtttctacattattattttaatggcagcctagtaatccatgatagtagtagatacttcatcatttgttccatcccttattattagacatataaaatgttttatttttattattagacatatatactgctttcaaattgtgaacaatgctcaggtgttcacccttggacctaaatctttgttgacatccataatgatttccttgcaattaactcttagtcatttggacattttagtcaatggcaaatgatgaacacactttgtaaagtgctttatgtaattccaggggaattttgaacatattatttaggggtataatgtaacatcagatagaagtataagaagaaagaaagtcacggtatttattctctcctgccaaactttcatagcaggaattcgaaaagtctctcctgtaacacaagaactgaaacaagatttgagaatgagccattaaatatcaattatcataaatcacttcttgctgctgctttgattaaatgttttccttgtgttttacaattgggaattccacctcatcagaagaatggaaaatgggaaaggatgaaatgatttcgtgtatcttggttattcttagaagcaagtgctttgagaaagaaaacaaattgttaacctcagcatcttaaacaaattgagtttggctgatttcctgtgcttagagaaaagatccccatagcttcatctggaaggcctcatccactggcccagttgttgttttcttgacatgaatgcatctagtataaataatctttaatattgagttaaacatttaaggatgtttcaggttaatttgaacaaatgaaggaatgatcctgattggtaaccattgaaaattctctcccacagggaaggaaccaaacagcctcagacactcttcctgaaagtggtcatcttaattcaacatttatgtctgtgatttgcttacaggggttttctgaatgagcttgtagaaacaccagtctttagtcagccactggaagatttgcaagaaatgctgtgctaatctcagaacaaggaggtgtaatttctattatctgttatcacaatgtaatcataaaaacaggcacgtggcaagcttgttgttgtggtcatgatcattatcatcaataacacactgccacttattgagcacttactatgtagactacatgcctcttgtctatgatttatttagttaatcctcacaagtctcttaataagtaaatactgatgacatcctcattttacagataaagatgctgagtggggaaaagttaagaaattggctatgatgacacaattacccatctgttcagccagtgcacaagttaggttgtctgactccaatgacaacagcctgagcaccttcattcaactcctttaggccttcattccaatagagtctctaagaaacaatggattatggattattatcaagtcaaatgattagattgttccccttcattcaccattttgaactgaaattgcttggatttctcaaatgtattatagtgctatatggtctggcattgttattatcaacttctttcccatcataaacacatttgacaaataaaattcacttgtatcatattctaccatgtggctttccagaagtattacacaaagtcaaagtctgtagtttttgcatagtgtcttccagtccagctgtaactccactgctctgtctcccactgatcctagagtcttcagttgaggagctacagtccggtaaaattgagaaagatgtgctggcttgacaaatatatcttgagcaccattaacgtgcaaaagtctggatcactgcggtaggcttagaggggatttaaaaataataagacagcttaagagagacaggcattgacaccattgacaaaatcacttcaatcttaaggcagtgaagaaaggagggaggtgaggagagggacgtgttagcagggcccattctcacatttcttaattggaattttgctttttaaaggtgagccacttctgggaaattctggaccatgaaggttttgttcagagcttaaaaagcctgacaaaaaaatgaaggagactggttgtaatggaggtagacaggtagaaaatcatgaagttgtgtcttatcaacaagggaaggtcaagctcacatctgaaccccaaaacttgggaaatccattgatattccttcttattataaaatgcctgttaaggcacttgctgtttatttcttagtaggcattgtggcagaaaatcaaattaattcagtgcataaactaacccctctcgatctcttgcttaaatgtataagcagaataccaactgctagagttttatatgtttcattttgattttttctgcacaagttatacaggatagcaaaatcacaagatgttcaacagaactcaataaatatttaatgcaacctttttttagatatgagaaaactccagctcagttaagaaaagttacttgatctatacatatagaaccaaaaaaacaaatctgttaaggctttaggctttagttgtaataagaaatatccagttgtactccctcccagttttgtgagtcatgtggtagtgattcacatcattatcaatcaataaatctgattcttcacatacagaatactttgtcttgacttcataggataacacctcctaccacctccaaacatgtgggtgagggaaaagataatcaaagattttaagtaaatctggattaaaaaaaaaaaacagttattcacattgttattttgggcacagaggaatagttgaatgccacatttaaatagaaagcatatatatttcacatttataaatctttagattctgtatgtgtcatgaaaaatgtaagttttagatagtgagatgtatgaaattaatttcaactctgtgtcaaaaagctccacagtaggcaattaatgcataaaacaccagggattgctgccctaaagcctccattgccagatgaaattacagacctcaaatcccatcattatcctggtatttattttttgtttgtgtggtctaggaaagatataatcttaaattgaatatttacctaatcagcaggctaaggatgttttctggtttctatccccttcaaatctagagcaaagtttctggctgtgagtgttaacatgttacccatattctaggctactactgcttactgttttcatttcatgatttacaaaatgataatattcatatgccacactggggtgaaccagagggggtttaaatgaagtttggtgaaaatcttattataccttttaaaattaaacaactataataagaatacaatatagggtatttggaaatatatgaaatatttaatttacatagcacttttgaaacgtttttaattttattatgtatttatttatttactttgagatggagtctccctctgccaccaggctggaatgcagtggcacaatcgtggctcactgcagactccgcctcccgggttcaagcgatactcctgcctcaacctcccaagtagctgggactacaggtgcgcaccaccatgcccagctaatttttatatttttagtagagatggggtttcaccatgttggccaggatggtctcgatctcttgacctcattatctgcccatctcggcctccgaaagtgctgggattacaggagtgaaccactgcgcccggcccgtttttaatttaagtgagaaatttgttcttactcaacaaacataagtttttctatcagatcttatgctttaactcacacctataattctggtcaatatgcttcaatagtgctattttccaatttttgatagtcatattcaataagaaactttttatcatttttacaaccattgagaaatttacaagttcattttttaaaagaacctacagtttcttctttctttcacacacataggcaattgaaataacttctgataatgtgtatcaaattaaattcaatccaagtttgtttttacaagtatgtcatagtaatgatggtgctctattttgtagaaggaacaaggctatatttgaacccccattttctatgtagcttggacatctatttaacagtcatatcatcttcatgtgaagatagagatatggaataaccacctaagttcttcctcacctactctaccctgcaatatgagttttcctagaaattcctgcagtcacttcttcatagtgagcactggcacacactgcagctggctgctgcagaaatcgatgtccacatgggttgaacgttgagcaaattatggtaaacccatgggtggagatgttgctcattgtgtttgccgcctgtggccacttaagcctccatcagtccctgcctctcttgagtcacctttccagaagactctggagttgctactcatggctggacgtcaatagctccagcattccaggtaaactagcctccccgcctgggaacccgaaaggccaagggagtcattatcttatgtgccacttacacacattagtttccaaactgtgtacctcagcagactggctagaaccctctgctttaggtatacgacttagaactgtcttgaagaacttttaaagtaataccaaaatggcaaacgtctctattttttaccctttctttatctacactgaacctgaagtctttgggagctgaaaacattgactttttatattgaatagatacttattctttgtcttttattcaaaacaatcagcaggaaggtaacaaactttggatgaaaaagtcaagttaggttggtgctttgccttagtcagaaaggtttatgaagagaaattgaggatgaagaacaaaatagatgagctttatctgctagatctaacctctaatcgtgtgacttaattccactatttgaaggattttcaactgatttagacaaagccacatttaaatacaggtcaaaaaggcattctaaagtcaaatggaaattatttggtttcgagtggtcttgatgtagaaataatagttttattctttgtatatttcagtctcttcattcattcattcatttgtacttgcattcttattttcattcatttaagtatcaattcatatattcatgaggcatttgttggtgtggtattgatctaggtgctgggctagataggtgaacaagtcattacctttactttggaggccctgtcagtcttgtgtggaatcctgtaggttatcacataactattgtaaaatttgacaagtaccgttttagtcgtatgaacagaatagaatatcaggaacaacaatttcattcagtcttgttatatatttgactatttagttgttcaacatgcaaaactttccaataaaggttgtaatattgaagggtaaatccaagtgttaatcacttttattttaagcatgttgtattatcaaatgctttggatagaagtcactataccttattgaatgtattttcagctcttttttttttattatccctccctaccttccccttctctgtaagtatggattttgtttttgtaaagtggcaatactgccataattactaccagtaaattgtgaggattaaaagatataatatatctaaagggcttatttttaacagctttttgaggtataattcacatgaaataaactgcatgtaattaaaatgcacaatataagttttgacttatgtgtaaatctgtaaaacccatcaccacaatatctgatgttcacaaaacttcctcctgtgtcttctttttgttaattaagcttccgtcagatttatttacatcttctgaaatgttattgaaaagagctcacatagtcactattggcttccattactcagcataataattttgagatttgtccatgttattgtctatattaatagtgtattccttttaagtgctaaattctattccattgtatagttcacaccacagtttgttccatatacttgttgatgggaatttaggttattgccagttaatttagctattaaaaaattaaagctactatgaatatttgtgtacaagcttttgtgtgggtgcctgcttttatttctcttcagtaaatacctggatggatcatatggtaagaatatgcttaactttttaagaaattgccaaactgttttccaaagcggttgtaccagtttacatttccataagcattgtatgagatgtccagttattctttatctccaacaaactgtgtcggcaatctgtttaaagtttagccattcgagtatgcatggagtgatatctcattgtgattttgatttgaattttctggtgatgaatgatttttattatatcattggattattttgccatctttatgcttttgataaagtgtctgttcaaatctttgtccactttttggtaagttggttccttattgtcaagtttttaaaatacttcatatattctagagacaagttctttatcagacacatacattgaagttgtttttcagctggcagcatatctttttgttttcttaccagagtctttcaaaaaactgaagttttcagttgtgataaagtctaatttatatatattttttcttttatggaccataaaagaaaaaatttttgtgtgttgtctaacaaatctttgcccaatattttcttctatgttttgatttagatgttttatagttttatacatttaggtctatagtctatttttcattaatttttctatacaatgtgtgttatgaattaaagttgattatttgcatatgaaaatccaattatttcagcaccaacatctccattgaattgcctttgttacaaatctgatgccaaaaaaataaaatctgttgccagtgtatgtataggtcaatttatagattctattctgcttcatttgtatatctgtttatctttatgccgatatcctactttgtcaattagtgtagccttataacacatattgaagttgagtaatatggatcatttagctttgttctttaaggttatgttgcctattctaaatatttgcatgtccacattcgttttagacttagcttgtcaattttaacaaaatcacctgttgggttatgtttggggtttcattgaatgtattcatcaatttgagcaaaattgtcttctaaacaattctgagcttactgattaatgaaaaaggtaactcagtttatttaggtaatttttaatttcctcagcaatgtttgttcattaagtgtacgggtgttgtacatcttttgttgctttttatatctaaatattttaaatttctgatgctataggaaatgatatttttgaaaactattttcaattctttatttctagcatatagaaatattgtacatttggttttgtatactgaccttttattttgcaattctcataaactcattttttagttttataaactttttttgtgaattccacctgattttctatatatgtgaccataccgtcttcaaataaagacaaattaatctctgtttttcatttgcatggttttcttttttcttttagtctcattgcatgggctagaatctctagtacaagattgaatagaagtggcaagaaaagatattcttgtattgttcctcatcttagagaaaagactttcaatctttcattactaagtatgttgttaaccgtagattttttcatagataccctttatgaggttgaggaagttccccttttctcctggttttctcatagttttttatcaggaatggatgttggttttaactgatttttctgcatctatggagattacttatatggcttttctttttaaagtttgtcaatatgttaaattatcttgattgctttccaaatgctgagccagccttacatttttaggatgaacctacttggtcatgacaaatgatcatttttatatgttgttggatttgatttccttaaattttgttgagtctttgcatatgtattcctgagaggtattgttctgtagttttcttttcttataatgcatttttccccgtacttttgctatctggataaatttagccatgtggaatgagctgggaaggatttgccctcctcacgttttcgaacttcatgttgaattgatattatttctgtcttacttatttggtagaatttactagtaaatatatctggacctggagtttttattgtgagaaggttttgcatcacaagttcattttcagcctactcaggttctctatttattaagtgagcccttttaacatgtctttgatctaaaatatcaatttcatggcacaaagtgttcataaatttctttattatccttttaatatctgtagaatctatagttatgttgcctctctcatttctgatactggtaatttgtgactttctcttccttgtttttcttgatcagtctgactagaattttttttttatttttttaaattatactttaagttttagggtacatgtgcacaatgtgcaggtttgttacatatgtatacatgtgccatgttggtgtgatgcacccattaactcgtcatttagcattagttatatctcctaatgctgtccctcccgcctccccccaccccacaacagtccccagtgtgtgatgttccccttcctgtgtccatgtgttctcattgttcaattcccatctatgagtgagaacatgcaatgtttggttttttgtccttgtgatagtttgctgagaatgatggtttccagcttcattcatgcccctacaaaggacacgaactcatcattttttatggctgcatagtattccatggtgtatatgtgccacattttcttaatccagtctatcattgttggacatttcagttggttccaagtctttgctcttgtgaatagtgccgcaataaacatacatgtgcatgtgtctttatagcagcatgatttataatcctttgggtatatacccagtaatgggatggctgggtcaaatggtatttctagttctagatccctgaggaatcgccacaccgacttccacaatggttgaactagtttacagtcccaccaacagtgtaaaagtgttcctatttctccacatcctctccagcacctgttgtttcctgactttttaatgatcgccattctaaccggtgtgagatggtacctcattgtggttttgatttgcatttctctgatggccagtgatggtgagcattttttcatgtgttttttggctgcataaatgtcttcttttgagaagtgtctgttcatatccttcacccactttttggtggggttgtttttttcttgtaaatttgtttgagttcattgtagattctggatattagccctttgtcagatgagtaggttgcgaaaattttctcccgttttgtaggttgcctgttcactatgacagtgatttcttttgctgtgcagaagctctttagtttaattagatcccatttgtcaattttgtcttttgttgccattgcttttggtgttttagacatgaagtacttgcccatgcctatgtcctgaatcatattgcctagctttccttctagggtttttatggttttaggtctaacatttaagtctttaatccatcttgaattaatttttgtataaggtgtaaggaagggatccagtttcagctttctacatatggctagccagttttcccagcaccatttattaaacagggaatcctttccccatttcttgtttttgtcaggtttgtcaaagatcagatagttgtagatatttggcattatttctgagggctctgttatgttccattggtctatatctctgttttggtaccagtaccatgctgttttggttactgtagccctgtagtatagtttgaagtcaggtagcgtgatgcttccagctttgttcttttggcttaggattgacatggcaatgcaggctcttttttggttccatatgaactttaaagtagttttttccaattctgtgaagaaattcattggtagcttgatggggatggcattgaatctataaattaccttgggcagtatggccattttcatgatattgattcttcctacccatgagcatggaatgttcttccatttgtttatatcctcttttatttcattgagcagtggtttgtagttctaggtccttcacatcccttgtaagttggaatcctatgtattttattctctttgaagcaattgtgaatgggagttcactcatgatttggctctctgtttgtctgttattgctgtataagaaagcttgtgatttttgcacattgattttgtatcctgagactttgctgaagttgcttatcagcttaaggagattttgggctgagaggatggggttttctagatatacaatcatgtcatctgcaaacagggagaatttgacttcttcttttcctaattgaatgccctttatttccttatcctgcctgattgccctggccagaacttccaacactatgttgaatacgagtggtgagagagggcatccctgtcttgtgccagttttcaaaaggaatgcttccagtttttgtccattcagtatgatattggctgtgggtttgtcgtagatagctcttattattttgagctatgtcccatcaatacctaatttattgagagtttttagcatgaagggttgttgaattttgtcaaacgccttttctgcgtttattgagataataatgtggtttttgtctttggttctgtttatatgctggattacgtttattgattttcatacgttgaaccagccttgcatcccagggatgaggcccacttgatcatggtggataagctttttgatgtgctgctggattcggtttgccagtattttattgaggatttttgcatcaatgttcgtcaaggatattggtctaaaattctctcttttttgttatgtctctgccaggctttggcattaggatgatgctggcctcataaaatgagttagggaggattccctctttttctattgattggaatggtttcagaaggaatggtaccagctcctccttgtacctctggtagaattcgactgtgaatccatctggtcctggactttttttggttggtaagctattaattattgcctcaatttcagagcctgttattggtctattcagagattcaacttcttcctggtttagtcttgggagagtgtatgtgtcgaggaatttatgcatttcttctagattttctagtttatttgtgtagaggtgtttatagtgttctctgatggtagtctgtatttctgtgagattggtggtgatatcccctttatcattttttattgcatcgatttgattcttctctcttttcttctttattagtcttgctagcagtctatcaattttgttgatcttttcaaaaaaccagctcctggattcattgatttttttgaagggtttattgtgtctctatttccttcagttctgctctgattttagttatttcttgccttcttgtagcctttgaatgtgtttgctgttgcttctctagttcttttaattgtgatgttagggtgtcaattttagatctttctgctttctcttgtgggcatttagtgctgtaaatttccctctacacactgctttgaatgtgtcccagagattctggtatgttgtgtctttgttctcattggtttcaaagaacatctttatttctgccttcattttgttatgtacccagtagtcattcaggagctggttgttcagttcccatgtagctgagcggttttgagtgagtttcttaatcctgagttctagtttgattgcactgtggtctgagagacagtttgttataatttctgttcttttacatttgctgaggagtgctttacttccacctatgaggtcaattttggaataggtgtggtgtggttctgagaagaatgtatattctgttgatttggggtggagagttctgtagatgtctattaggtccgcttggtgcagagctgagttcaattcctgtatatccttgttaactttctgtcttgttgacctgtctaatattgacagtgcagtgttaaagtctcccattattattgtgtgggtgtctaagtctctttgtaggtcactaaggacttgctttatgaatctgggtgctcctgtattgggtgcatatatatttaggatagttagttcttcttgttgaattgatccctttaccattatgtaatggccttctttgtgtgttttgatctttgttggtttaaagtctgttttatccaagactaagattgcaacccctgcctttttgtgttttccatttgcttggtagatcttcctccatccttttgttttgagcttatgtgtgtctctgcatgtgagatgggtttcctgaatacagcacactgatgggtcttgactctttatccaatttgccagtctgtgtcttttaattggagcatttagcccatttacatttaaggttagtattgttatgtgtgaattttatcctatcattatgatgttagctggttattttgctcattagttgatgcagtttattcctagcctcgatggtctttacaatttggcatgtttttgcagtggctggtaccggttgttcctttccatgtttaatgcttccttcaggagctcttttagagcaggcctggtggtgacaaaatctctcagcatttgcttgtctgtaaagtattttatttttccttcatttatgaagcttagtttggctgaatatgaaattctgggttgaaaattcttttctttaggaatattgaatattggcccccactctcttctggcttgtagagtttctgctgagagatctgctgttagtctgatgggcttctctttgtgggtaacccgacctttctctctggttgcccttaacattttttccttcatttcaactttggtgaatctgacaattatgtgtcttggagttgctcttctcgaggagtatctttgtggcattctctgtatttcctgaatctgaatgttggcctgacttgctagattggggaagttctcctggataatatcctgcagagtgttttccaacttggttccattctccctgtcactttcaggtacaccaatcagacgtagatttggtcttttcacatagtcccatatttcttggaggctttgtttgtttcgttttattcttttttctctaaacttcttttcacacttcattgtattcatttgatcttccatctctgataccctttcttcccgttgatcacatcagttactgaggattgtgcatttgtcatgtagttcttgtgccgtgcttttcagctccatcagttcctttaacgacttctctgcattggttattctagttatccattcgtctaattttttttcaaagtttttaatttctttgccgttggttcgaacttccttctttagctcggagtagtttgatcttctgaagccttcctctctcaactcatcaaagtcattctccatctagctatttcctttgctggtgaggagctgcattcctttggaggaggagaggcactctgatttttagagtttccagtttttctgctctgttttttccccatctttgtggtttttatctacctttggtctttgatgatggtgatgtacagatgggcttttggtgtagatgtcctttctgtttgttagttttccttctaatagtcaggaccctcagctgcaggtctgttggagtttactggaggtccactccagaccctgtttgcctgggtatcagcagcagtggctgcagaacagtggatattggtgaactgcaaatgctgctacctgatcgttcctccggaaattttgtctcagaggagtacccggccgtgtgaggtgtcagtacgcccctactggggggtgcctcccagttaggctgctggggggtcagggacccgcttgaggagccagtctgcccgttctcagatctccagctgcatgctgggagaaccactgctctcttcaaaactgtcagacagggacatttaagtctgcagaggttattgctgtcttttgtttgtctgtgccctgcccccagaggtggagcctacagaggcaggcaggcctccttgagctgtggtgggctccacccagttcaagcttcagggccgctttgtttacctactcaagcctgagcaatggcaggcgcccctcccccagccttgctgctgccttgcagtttgatctcagactgctgtgctagcagtgagcgaggctccatgggcgtaggaccctctgagccaggtgtgggatataatctcccagtgtgccgtttgataagccctctggaaaagtgcagtattagggtgagagtgacccgattttccaggtgcagtctgtcacccctttctttgactaggaaagggaattccctgaccccttgcgcttcccgggtgaggtgatgcctctccctgcttcggctcacgcacagtgcgctgcacccactgtccggcactccccagtgagatgaacccagtacctcagttgtaaatgcagaaatcacccatcttctgcgtcgctcacactggaagctgtagactggagctgttcctattcggccatcttggctccacccccagtctgactagaagtttacgaatgttattaatttttcaaagaatcagctttgtgcctgaattattttcctcctttttaaaatttttatactatcatttcaggctgatttttattatttttttcttcagcttactttgggtatagttttctctttttattctgatcttttagtgtgaaatctggggtaattgatttgaggtctttcttcttttttctaatataggcatttaatgctataaatttccccttaagtactactttagtggtattctacaaatactgacgtgttgtgttttcattaacatttagtttaaaacagttttaatttcccttgtgatttcttctttgattcctaggttattttgcagtacattatttagtttacaagtatttgggatatttctagagatctttctgttattgatttctaattagcagaacttgcatcttttaaggtttactgaggcttgttttatggtccagaacatgccctatcttggtaaatgttccaagtcccctttcagaaaaaaatatatgtgtgttccattattgttcagtggaaggttctataaatgtcaattaggtcaagttagttgatagtggggtaaaagtccagtgtacccttactcacttttctatctacttattctcttaattattgtgcttcatatattttgtagctctgttttttgcctagagattgagaactattatgtcctcttgataaattgtcccctttatcattatgaaatgattttctttatccctggtagtattttgttttctgaaatccactttgcctgatttaatgtaaccacttacctttttttttaactggtgattattgatattgtaaggtttacatctatcatcttgctatttgttttctatttgtttcagatttcaaatattcttgagctttatttgaggatgcagtgatattacttgggaaacagtttcattcattctggtgttccttccaagggtcgttaggaaggaacagaatcatatttagtctaaggttattccctacaacctaggccagacccttccaagtcctcaacccactatcccatgaattatgaggttttcctgtctgggtagtggaaacaggcatgatttcagggcctgtgtgcgcctattacctctaaaccttgttttttctgatttctttgcatgcatgcaccaaacagcactctgctaaatgcttgagggagaaaccctttgtggatctctggaggtctctttgtgtgcagctctattatttctggtattctgtcctattaattctggctgcagtaatctctccagttgcctctgtgactcttcaactgaagaagtcttttgggctctgtcttatttcccctcctgcattttggcctaaaatctctatgaatgcgataagctggggcagtcataggactcattttgtttgtttcccatctctcaggggaaaactgatccttaatgatctaatttcttaaaaatttgtttcatgtatttgtttgcttattgttttgctttttgttttgttttgtttttgagcgtttcaggtaagaaggtaaatccagcccctattactctaatttagctagaatagggaatacaaaaggatgcaaaattgaattaatagtaccatatgactttctttcctatattagtttgttaccaacatcctcgtggttaaaatgaaactttaggtttccctgtggatttttctaatgtagtcatgaagcaaaattccaacgacaatggatagttgactgcacaatacaacaactgttcttaatgaaataaagaagattcacattcctacattatattagtgagggcaatatgagctggtgtaacaacagttctctatattttagtgactgaacgtgaagaaaagtttcatttcttgttcacattggagtagaacatgatgtttccaatgtgctgcagactttttttgatgaaataacttggggacccagattctttcatcccctgtctctgtcatttcccagtgcctcagaattttttgttttgtttttgttttgaatacagttagaagacagagaagagggtgcagaagccacattgttctccatcacctaaacccagatatgatactcattacttcaactcacatgccttggcaagatctagatgcaggaggttctggcaactgttgccctgacaagccaacatatagcaacagctgtaccccaaaaaggcaagcaagctctctgctgaattgctcaccatctcttgacaaacataaagaactctttggtcttttaaccccttctaaaatatatgcttcatttttccccccatgcctccaactctgatgctgtgcagtagcctcaatgtctctttcatccactcacgctcttaagggagccttcttcttttgtataactaaaaaagcacactaggtttcttttcatagcacaatccccacatttgtatcaaaatcacacatcacatctcaccaggtgattgctgaataatctcagggactgtggagtccatacaaaaggaagccatgattagcttcaaagcatttgtgaagtagacctgcttggctccctttcagccaggtaggctagtacctgttggacttctttgggattagtagactgctccctccagtgacataaaaaaatcataagccagatagggaagttatgagaattaaatgagataattcatgtgaggtgctaaacatggtcccaggcacatatagaaagcaattcataatcaaagctcttgtaattattagttaatggtaggattttaaggaaatatttaagtgccctccttgtggatggcgataatatattgaaaaagttaagctcgtattgttttcttcaacaaaaaaaattggtatattatgtatatataaaacaaatatgcatagaatgtaccccacaaatacttacaaacataatatatgcatatttgttctatgcatagaacgtgtaatgatcaagtcaggatattcagggtatacatcactgaagtatttatcctaccagtgtgttgtgtacatgtcaagtcctttcttctagctattttgaaagatataataccttgttgttaactatagtcaccctactcttctatcaaacattcaaactttttctgcaattaacttatgttgtttttaactatagtcaccctactcttctattaaccagtagaacttatgctgcaatgaaagcataataagctttcattatgtgctagctgtctgattcttcaagaaaatgggttttccccctcaccttctgacatatccctaaaataaggtctgaacacctgtaactgaatccccttataagttttcaccacccagaaagaggcagcaaagaataccaataaacaactttggttctgaattctgaaatcaaggcccagcttgaattacttactattgattacttactagccctgtgagctccaattcagaattcaaggtccaggtctattacttactatctgtgtgagctctagcaacctctttgcaaatctgtgaaatttagtcagtgacattccttcatagaaacattatcaatggagagagataatatatgtaaagtacttagcagagaagatggtgtatagtaagtgcctaataaatgttattataattaatatgattataaagaagaggcagtaaaatgtagtaggtagaatattgagattggagggagatgactcaaatttatgtctaggttttgttgcttttaactgctgaggctcagtattctcaccaataaagtggggttaataatattcccctccaggggttgaaggagtgattgtattataaagtatgtgaaagtaaataaaaccttgcctcaaacccataaaatcttaattgcgtgtaaaaattctttacttcatttatagtatctgtcaccctaggcaagttgacctttctttcacataaattatgtcttttatttggccttctgtagttagtatcaaaacaagacaaaacaaaacaagattgtaaacaattataaagaataatactgcatacagcatcattatttaagaatagaatgacggccggggctggtggcttacgcctgtaatcccagcactttgggaggccgatgcgggcagatcacctgagaccaggagctccagaccagcctggtccaacacggtgaagccccgtctctactaaaaatacaaaaattagctgggcatggtggtgggagcctgtaatcccagctactcaggagactgaggcaggagaatctcttgaacctggaagttagaggttgcagtgagccgagatcacaccactgcactccagcctgggtgacagagccaggctccatcaaaaaaaaaaagaagaatagaatgacagggctgggcacagtgactcacgcctgtaatcctagaactttaggaggctgagatgggcagattgtgaggtcaggagtttgagaccagcgtggccaacatggtgacaccccttctctactaaaaatacaaaattttttgggtgtcatggcacatggctgtaatcccagccacttgggaggctgaggcacgagaatcacatgaacccttaaggcagagattgcaatgagtcgagatcatgccactgcactccagattggacgacacagtgagactctatctcaaaaaaaaaaaaaatagaatgacattcttttcctgaaagaatgtgaccgttgaaattatgaagaaagaccactgctggatttgtgcagtgacatttctgaaacacattgtatatggcataaattgctttaatcacaaaggagagaaatattaatatctgtgctcctgtaagctctaccccaagttaattttaaagttattagtaaagacaaattccattgggttattgagtgccttgctagagaatctcaatacaaaggtttagcaaagtatacccataaattcagcaacacatacaactagcttattgcaattcaggcgggaaaataactctctaaggcagggatcacgcatgagttttgccgtatgggccaactctcatgcattgcattgtagtcggaaagattctgaggtcaagtctgaagtcaacagtcgaaaggggttctgatctacaaataatattctactatgggtgttagtggggagagatgacagtgtgctgcctgttcaccctccctctgctctgatgtggtttctaattcacattagaggattaatcattacagagaagccctgctcctctcagacctttctctctaagactttgggcaaacgccggcaccatgtttttcattcatttttttcttttctcttattattgtatgagaagaaaaccagagagatttctgtggcatattttccacactctctcttctgttctcctagggagatgcccttctatcctgtctcagtttcccaatcctaaacgtccttcaaaagtaagttcaagctcatcttttctgtgcatgtttacctgctcagtactgctcacatgaatctctcgcaactccaaacgcctgaaaaaaggtttatatctcacaattgagtgttccgttgtagaatgtctcttatatatctttagagtgttactatgtcttgttcaagtagcacaggggccgggaaatacaatttgaagggagaggctaatctttaaaggcagtcattgattgtattttaaattacaatttacaaccccatggtaatgaacacataggctaaacaaatataaactcaattaaaataacatgcaatgatactttacaaaaatgctgctgagaagaacatcgagtttacatcatgctgaatatctaaaaatagctagatgactatttaaccttctatttatatgtatagatatagcgttataattttcccactagaatttaattttatattatagaccctttcagtgccttcagtgaccctatgagtgtctttttaagattgcctttggaccctggtgtcgttttgggactgccactaagtgcaatcctaaaattttccataaagattcactcttgcttttatttcacaaggtgtttccatttagttaaaattaatctctctgttgaaggaatttctcccaggactcagagctttccattcttgattaaggtgtctcacttgtcagcttgctgagggcagggatctcagagcatagctcaatggcagccgaagccccggtgtgatgtgtggcattgcttcattccagaacgagtgttccctgagggctgcatttgacatctgcaaaacgctccctctgcatttgcactctcaacactgacacaaaaatgtaagccttgttttgtagtgtcccataggcagcacatcttgcataaaatattttaaactgtatttcaccttcgtgtaggtttgttttactggtttctgcatatgtcccaagttaaagcattgctgcagaccaatttcattcccaccccgatttaccctcctctcatttgcacattgtaacatagcaaggggacacctttcctcatatccaccatcagcccatcccctactgctctattgtccaagatatttaccagcacaagtaacaccttcaatgtttcatccattcattcaatgtaataagtggtgagaaaacacagtgaaaaagagggatatatttctggtcgacttggagttgacaatccagaggaaagacattatataaacaggtattccactaactctaaaagacacttggatgcattttacaaagataaagtacagactgttataatataacgtagaatggcaaacaggagctcacctattttggaagcaggtgatcaggggaacacagaaggatgttttaaataactctgttgaggtaaaatttacatgtaatacacggcatacatgtacacacactatttcattatgtgtatatatgtgtgtgtgtgtgtgtgtatatatatatacccactagccatcatcgtaatcaaaacatcaaatttaccacccccaaagttttcttgtgcccctatgcaatctttgttactctctatatattagtttacatttcctagaattttataaaaatggtatcaggcttttttttttttggaagagtctggtttattttactcagcataatggtttgagatacatctgtgctattttgtgttatcaatagtttactcttcttattggttgactaattgataaattatttacttttttgttgctgaatagtaatcttctgtgagggtgtactacaatttatttatctgttcacctgctgatggacatttgagaaattttcaggcttgtcttttgtaaataaagctgttgcaaatatttgtctacaagtatttgtgtggatgttattctttcattttccctgggtaaatatctaggagtggaatttctgggacataatttcattttctaagacatttggtcattgaataaatggcagtgacggtggtctagaccttacataaccgatgtctgacatgtatctgagagttgaagctgagttaaactaaatacaaaaaaactttcctaagaactaatatggatgttaccaatttcataccctaaaatccatgactttggattataagagagtccttctagctctcattcaaaaatctatttgatacctactttatacagttcaaataaatccaggtaccaagtttctcatactagagcatattagaagcagaaaatccagtggttgaagagaagaattaatgcagataagtgaaagcatataccacagcaaaaaaagtgaaaagattgaaaaacataaaattataactcaaaacccataatcaaaatggtactttaaggccatgatgtccaggggcatatggccctgtaggcgtcatttgattaaagtggaggaaatttttgatggtgaaaattaaaatgctaatctgaaagtgatagctatgcttgattgtgtaatatgtggcagaattaaggctaagctctctctacacatgatctcatttcattcacataatgaccctatgaagtaggtattgatacattttacagaggaagaaaggaaagcttagagaagttaagtacctttgctttggttgtatggctcatggccatgactctagcctgcctactctaagtaatcaagaaaagattaaattatgttatttttacctatgtaaaaataataataaattttaaaagaattccatcaaaactagattttttttccttcaaatttggaattcttcaggaagatggttaaggtatgtaaaatagcagttaaagtagaaacatccattccctaatcatggaaaataaatgaagtttttctataaatgctttctaataattacattaccctttgtgatgctctgtgaggctatgaaaagactctaggaaactgggcttcctgaaaagtggcaagagtttaatgctaatactagacaatatattaccccatctgacctcattaagggttgcagttaccatgtttagttacaaagcacatatatccctcaaatgagtccacagttttttaaaataggaagtcccagacatgtgatcgatcaccagattcatttagaatccatttatctttatgacaatatgtattatggatcatcagcccataatcatgcagactctattaatgctcattgtccgtatggtgattttaaaatgtggtgtctctactgggaggttagtttttttcacacttgtgagtaacaaatggaaactcatggagaggtatggtttctctctgtctcttggactcttatctgaaggtgtttctttctgtagcaccagaaaagaggctgaacatctaaaaactggaggaggtcagactaatagaagattagatttaggaagtttctgcttatatcaataggtcctccaaaccaataacaactataatcctaaacatactttgcttaaagactaattctagtgttaaatcaggcaaacatcaactaaccagacctttcttttaagggaagcttccagccccagtgtgtatcccaggcaatgactcaagctgagccacccccaatccattcccctgctcttcccgacctctttccagtgtgccttcttctttgtatttcactgttttggatttaagaaatttgcaaagaattctttgtggtcctgataaagattttccagctctcttttccagctatgacatcactttagcacctttgaagcccactaatcaatgtatataaccaatgatcaccaacccccaacccaatccaaatcaacatctctccacacttcctatgcttctgacactaatttatctcccaccaaaatactaccagattaatcccatcatgcctttattcccattttactctgtaaccaccaaaaaatccaagcatcccaggattttaaatacccagaatttatccctataacccgttatatcccttaactaacataatcttccatttctttccaattcctcactctccaaaacattttcaatgtattccctggaacatgcagtctgtcattagcaaaattcccaatctccaatattttctcttattgttttcttcctcttctgacttgaatagaaaattgacttcccttgatgacccaggttcccttattttcccctaagaggagaatgcctttttctgctccttctacctatggtggggcctgggggttggatgtcattctctttctctcttattgctgtttctcagacatttctgattcaaaaaactcactgtattaaaaacacaggccaacaaaatgtactatcctggttgtcatagttgtctgctaaattttactcatttctccttattttctgaatatttttgcttgcagccttctgtttttctctcactatttttgtccttatttctggtgatttcaaaatttacactgatcgtttgcccaaaatcccagtctctctcacttccttgacctgtgtacatatgagatcttctcttccacctgatttcagccactcattcctttggaaatatcctataacttattatcagtaagagtgaaatttgcgaaatctcaatcactagcatcttgtgttctcacagccacctccttctcttcataatatcacgctaaagataccagtctgacaatttgcaggcccctttcagatctctgaaaaccctgtcaattccaccttacgcagtttaactgctactcttcttgtcataatcattcccttgctcataccttcaactcctttgcctcttctccatttgttgactttcctggcaaaccctctcataactctccacctattagactgctgaattgaggaggtagaatatggc

SEQ ID NO: 34 - DNA, 200002 bp, Homo sapiens
agccactggttacctgaaatgcagccagtcctaattgagatgtgctataactataaaacacccacatgattattgaagatttggtgccaccaaaaaatttaaaatattcgttaataatttgtattctgattacatgttgagattataatatttcacatacatcagataacataaaatgtcattaaaattaatgtcacctatttctttttaatttctttaatgtgactactacaagttttcaaattatatctgtggcttgtaattgtggcttgtattgtattctttttttctgagatggagtcttactctgttgcccaggctggagtgcagtggcgagatctctgctcatcgcaagctctgcctcccaggttcaagtgattctcctgcctcagcctcctgagtagctgaaattacaggtgcccgccactatgcccagctaatttttgtatttttagtagagacggggtttccccataatggccaggctggtctcaaactcctgacctcaggtaatctgcccacctcggcctcccaaagtgctgggattacaagcatgagccaccacacctggcctgttttatattcttactggacagtgctgatctagagcaggagtcaagcagttttttctatgaaaggccacatagaaaatgttttcagctttgcaggccatgcagtctccatcatagctgttcaactcttccattgcactgcaaaagcagccatagataataatttacaatagacatagcagtgttccagtacaactattaataaaaataggtggtagccagatttggcctacaggctgtagtttgctgacccctgatctagaagatccaagattttattcatatgtctggtggcttggcagggataggtggaaggctcagctgggaccattgacccaaacagctatacagtcctctccagcatgatggtctcggggtagtgggacatcttacgtggtggctcagaactccagataaggtactcccagagagacaggtagaagctgtgaggcttcttatgaccaagctctcgaagtcccagaatatcccttgtactgtattctatggtcaaacaggtcactcaggctagcccagattcaaagagaggagatccaactctacctcttcatgggaggaggagtagccaaggatatgtgtttctttttaatctattatatcattcttcagatctcagtttaggctggtcctgttatgggctctcaaagtaccatgaacctctcttttgtagcacttgtcatagctagttttacatttctctgtatgattacttgatcactatcttgcttttctactaaactgtaggcaaccacgtgaagaggaactgtttctggttttgctcattatattcctagcaccaaacacaatgcttggttcaataaatatttgtggaagaaacgaatgaatgaatgaaccaatagcaaatgaatgaatgagtaataactgtatcaatattaatcctacatttctccatattgctgtcacgtatatcataagatactctgtcagaagccttgctaaaattcaaatatatttgattcccagtaaccttcttattttgtagttcagaaactttataaagaaggaaataagcctatcttactcttcccagtatctcaaagagggtttctgccctgagctgctcaagagggtttctgccctgagctgctgttcattctgcaaacactgctcgaatacccactgtgtgccaggtacagagagttcttctctgctgtaatctggacaggcaccagcttcccagcgtgggtttaggcttcaggtgcacactactgtgtaccgtctaagccacacctagaagagctctggggaaatatgactacttgggcagaaaaggaaggaactaagaagaggtatctttgtgtctgaggtctgaaggagcgtgtgggctcttgttcaggcaaagggcaggatgaggggaggtggggtggcagcagccagtaatggggtgggacagcggaatgcagaggatgaaacttcaggtcctggtgctctgagaagtaacgctgtgcagcatgtcacacccagaggcaaaccaaggccccagggagctgatgttgcactggagctctactctcctctcagcgagctggtgacgtgccagtccagcaggcctggcttatccaaccacaagtatgaatcggcagaaggcaatgagctgggccctgagtgctgctgggctgaggccgacctaatccttcctccacagagactgtggtgtcccctgctttgctcagggtaagaactcttgtatacctcacaagaagccaaggactacctaccaccttccacactggccctggagcctgcattgtagttatttgtggacactttttcttctctttagtgccaggtgggggaccaaggcctacatgtctttacaacccctcaatctctagaacaagtctgacactgagtagatgtagcaaatgtttgcctgaaagactacctcaataaataaccttctgaggcaccagcaaacttctcagcatttttcctgatactccggttaccactaacattctacacaaagttgtgaaataagtctttttctttgttgctctccaacatctactgtggacccctcctctcacttcctgtttcatcctctctgcactcccctgtcccaccccattactggctgctgccattccacctccctcatcctgccctttgcctgaatgagagcccacatgctccttcagacctcagatacaaagataccccttcttagttccttccttttctgcccaagtagtcatatttccccagagctcttctagatatggcttagatggtccacagtagtgtgcacctgaagcctaaatccacgctgggaagctggtgcctgtccaggttaaagtggagaagtactctctgtacctggcacacagtgggtattcgagcagtgtttgcagaatgaacagcagctcagggcagaaaccctcttgatgcaaagggatactttggggccccttcttctcccaccccagtctgtctctctgagagtcctctcgattccaggagccaccatcacacctggccctaggctgtgctgctcccgtctgtctcagaggctagataacatcagagtcctttccactggctcctgtggcagagcaaaaactggttggcatttttaaacgtgctacaccagtgtgtgaaagaaacacaggctgcatgggtttaaatctcagctgtaccatttactagctgggcagcctagggcaagtactgtgacctctctgagactccattccttcatctgtaacatggggacaaataatctcaccctgttgtgagcagtaataatatgattaatcatttagccaactcttattcatgttctctgatgggccagacatacaaagtaagtgaaagtggattacggcaggtgctcttcttggtttctggagtgaacctccatttacatggaggctcctctttttagatttctgactagttcacccaccttattcatagaccttattctgtgcttagctgacagaaatctcctctcagagaatccccccggtaaattcttaggttctttcctcttccattcccctttttgctctctccctccgaaggcaagagtttccactttacaggcccactggagaaagttatggcttctggttgtggttggaggttcattcctgagggagtggggacatttctacacttcttcacggccaatgacattggagaaactggcttcctaacccagcccacaccctcgcacacacacatcacacatcatggctagaatggagagaaattcttcatatggggcacttgtacttcatgaaagaaaatcatatcaatcttgagtattttaacatcctattacagcagggtcactgataaactaagtgtccagagtgttttctaggatggtgtgtggtctccaaattaacattagtgaagcttactggaaggattgttactcctgggccaggccaggattttgaggagagatgtgtttgctgtcaccaaatccttgacagactttggcagaagtgtgttaggcttactctggatagcttcagaggacaaaactagtattgacggaaggaaggtaaggagaagcagcttctaacccaggggaagagagagtttccaaactgagaaatcaaaaatggtactgattccttgtcagggtcagtgcttctccccactgtgtgaattacaggggccatttgtccaagattccttagagcaatactgatttcatgtaattatttgaatgaaaggtgatttgttaaatttatagtaaaatataatttgatttgtgtccctgtttgtcatgccaccccagaagaaaaattgtctttggttaggtcgaacataatggttttttggtttgcaaaccatgagcgattcccatattaggtgggagttcagattcaaagggccctcttttttttttttttttttttgtagtagccagcctaatgagtaggaagttgttctcactgtcattttatattgaatttcttttattttgagtatgaccatcttttcaaatgtatgagatagttatttccagttccacatactatctgtacatttcttttgcccgcttttagtttgggtctttggcctttttcttattgatttatagaagctcttttatacatagaaaattaatactttgtgactagttgcaaatattttcagttgctgaaatacacagtaggtgttccatgtaagagctgaacagctggttcctgattgctgtctccctcccttccagccaatagatttcagagtttgggcattacctattgagccaaagctgacaccacacaagcgcagagtatgggaacagagttctctgtctgattcctgtgagcttcctcatactaaatcaccaacagcaacctacttatcacagaatatgagaattgaacaagtgttggcaaggatgtggagaaattggagctcttgttccagttgtcgatgggaatgtaaagtgatgtcgctgctatggaaaatagtgtagcagttcctcagaaaattaaaaatagaatgaccacatgatctagcaattccccttctgggtatatacccaaaagaactgaaagcagagtcttaaagagatattcatacagccttgttcataccagcattatgcacaatagccaaaaggtggaagcaactcaaatgtccatcaaaaatgaatggataaacaaaatgtagtatgtacatacagtggaatatcatttagtcttagaaagaaaggaaattcaaacacatgctacaatgtggatggcccttgaatacattatactaagtgaaataagccagtcacaaaaagacaaatactgtatgagtttacttataccctaagcagtcaaattcatggaaacagaaggtggaatggtggttggcaagagctgagaggaggagagaaagaagagttattgtttaataggtatagaggcttagttttgcaagatgaaagagttctgaagatggatgtagtgatgactgtacaacaatgtgaatgtatttcataccactgtacactcaaaaggtgaagatggcaaattttatgtgtattatgccacaactaataaagatttctaaaacttatgagatctaatttcaccgtttcctattgctaaagatcacaaattagaaaacacgttggcaaaaggtacatgaaaataagcactcttgtgttgatcagagcataaacgtataatctcataaactaataaagatttctaaataacaaagatttctaaaacttatgagatgtaatttcaccatttcctattgctaaagatcacaaattagaaaacatgttggcaaaaggtacatgaaaataagcactcttgtgttgatcagagcataaacgtataatctcaggggagaacaatttgcaactattcttcaaccctttggtcaaacgattctgcttctaggaatatagcttactcccacctgtgtgatatggcatataatcaaggttttccattgcaacaaaagattggaaacaacgttaagtatccatcactagtggtctggaaatatatatatattattgtcatccaatagaatacaatagactaatatgcaacttttagcatgaggatactcgttacatgctgatacagaataatctccaaggtagtcatatgtgtgcaaaaccgtacatagtatgctaccatttgtgcttaaaaataaaaagaaaacagaatatgggtcaatgtttttgtttagttttgtctaaagtaactttaagtagaggcaagaaactggtaacatgtaacagtgatcacccctgttacctctgtggaagaaaactagacagctaagggacaaggctgggaggcagacttgctttccactatttatcacctttatctttcaaatttagtaccatctacatttagtaccatgatctattcaaaaatatttattaaaaaaagaaaaggtatagtctagaaggaaaaaaaacataacagacacttctagcccaatgtcctgcactgggtgctatgagagcagaggaaagaaacacatatggcttctagacaacaccgtctggggcatacatttctgctattcgatcaagaatagttgtgcatcttttcctggaaagaattgatttgtttttatcaacagacctatgaatttagtggacagacctgtgaattaattcactggttaggttttcctttttacattggctgttaaaaagctataagccaaatttatgtccccctcagtgcaaattgggcagatttctagggcaagcatttagcactggccttgtccttggctctgtatcatattcctgtatttggtttgcttttccacctgtttctcatgttggtcatctttcctgtgtatggccataccatcctgaatgtgcctgatcgcatctaatgttggtcacctctccttattctttgcttccttataagccactaagcagcctttttggtgctagttagggtaagtgcgtgggtagtgaaggagggaggagggagaggaagaaagaagatagaggttataaagcaaagcatatcctttttcttggcttcatcatgtagattaagtgaattgctctcaaagcgtggtccttaggccggcagcattgtcatcaccttatgttgttaaacataaaaattcatgggtttcatcccaacttactaagccagactttctgtggttgaggcccaggaaactctccaggtgatttttactcacattcaagtttgagaaccacaggaaaacaaaaggaaggcagatttctaagcgtaaatgcaatactaaccgattgcccccatcatgcctgttatgttggtcaagataaataatactagctactgcaataatcaatccctcaaattttattttttgccaatatcacaatccattgtagatcagttgtgggagaggtgtaaagagagctgctttattagtttattaagcaaaccagatctcttccattgtgagactttgcgattttctaggcccttggacatttcctctggatcccctgctgctaagaaggcaggagagggaggaaagagaagagactttagcagccagatctggaagaaacatcttttctgcccacaattccattggctagaagccagtctcatggcctgtataactgcaggggaggctgggaaatgtgacctatcgatggagctaagagcaaaaggaaatggctttgatgaagccctggcattgtctctgcacacccgagaacccaagtgaatcccaaactccacgtccaggtcatgttttggtgaacatcggttttcagtttccttttctaatcaagttttacctttttttttctcgactctagcactatgggactgagtaacattctctttgtgatggccttcctgctctctggtaagaacctttcagctttgttaagtcctggaatcctactgtctcctgatgagtctgaccacagcaagcccaggcctgagacttggtgggttttactcactttctactgagcattgtacaagaccacatgcaaaaaagactttcctggagaagaaggaagtgttatgattgagagcagctgatggcaggcagctgggatggagctctcccccccgtgtgcttcttcctcctctgcagtctcacatcagtgagcctagatgctcagagtagggtagcctggcccatcccatggggatgggggaaggctgctgcactgaggcccctgagacttgactcttttgttccacacatattctcttctggtcttctctgaccctgtttctgtctttctcaggctcctaggaaacaactgacagaattccaaaagtctcccttcattcggagcactggctttcacgtccctgacttccctaccctctctcactcccttccctacagcccatgcacatacctcatggttgccacggcttcctgacaactatggatgttcagctaattgtgtcagctgatttatagtggagccaatgaagctgaagcttcagagccctccatttgcacaaccctttctaaatccccctcaagaccctgtgaagggccccctagcagtgtggtcacctgtcttatgctttggtaaaatttgaataagtaagatattgtaaccacaataagttatgaccactgtctccttcctctgcaacttttccctccatgccattctcctgtctggtggtgttagcagtcaggggcattttgtatttgaattctacattctttttcttaactatccaccacctcccctcaaaattttaacagcatccagcctcacaaaactcagatcttccctgtttacagttccactttgagtttcagtttcttcatctataaacaggagttggctgcggtccctgccatgtatcctgtgactcagtgtctcgtagttactcctggcccaccccttcctgctgctccttgtctccacctgcaggcctgagagggaagccaccccactaagacagggaggtgaactgagcctgaagtttggctacagcacccacaggccaccagccatgagttcacctcctccagatggccacacaccaggcccttggccactgtccccatgtctgctgtggatgatgaggagtcagggaactacaaagagatggtccctcagatccatgctggctgggataagccttttcagatttctgtttttctgcttagcaccttgagcttgtggagtccttgagtgcaaggtctgtagatgtgccagctgatcactgacttaggtaacaacagcagcttccaacccccagggcccatgacctgctaccttagctcctggggatgtgggaggtatgtgtgtgtcagagagcaaggcaagaagactctagagaacattatccagtaagattcccttctcatcccacttcttatttatttattttatttattttattttttgagacagcatctttctctgtcacccaggctggagtacagtggcacagtcacagctcactgtggcctcgattacctgggctcaagcaattctcccacctcagcctccccaagtgctagaattatatgcatgagccatcgcacatgacttattttatttatttgataaatgcatatatacacacagtcatgaatcgtttaacaacaggggtacgttctgagaaacacattattaggcgattttgtcattgtataatcatcatagggtgtccttacacaaaactagatagcatagcctgctccatacttaggctacctggcacagcctattgctcctaggctacaagcctgcacagcatgttactgtgctgaatactgtaggtgttgtaacacaatggtatgtatttttgtatctgaacatatctaagcatagaaaagatacagtaaaaatatggtgttataatcttatgggaccaccattgtatatgactgaaatgtggctgtgcaatacatgacagtatatgcatatatatatatatcccttactttgtgcctggtactgttctaagtacctcataaatattaactcatttgagcctcacaataactctctgctttaggtcttgttgttatttcccattttaagatgtggacactaaagcccagagagatgaagtaatttacccaagatcgacagagctactaagtggcagagcttggattcacacccagcaatgtagatttagcattcgttcacttgactcttctcctaactcttgtggtaaaccatgaataagtggtaagacttcttccatggggcctgaacagctttggtggataatatagcttctgcctcatccgtgttcatccagtgcctcctccccatcacctgcagctgacacctcagttgacccaagagcttgggcccaagcccttctcatcaaagtgaccagcccagctctcaagatctgggagagaaggaagaaaaatgccctggaaacacatttccagaaaacactaaactggaacaccatttcccaccaaattttctgactccgcacactgaaagtgagaaagtaaagccgagacactctatgaaaactgagttcaggtgtcacttttgcccttgatttgccattgacacttcttagaagtttcttagctcctgagaaaagagttaccaatattgaaagcaacaacctcaaatggtaaccgtttaagttttatggtggtgagagaataagtgactatatttttggcagtacaattttaaagtggaatagaaagcccatgacatcagatcagaaaataacattgccagtaattcacacacgatgaaaagcaacaaaaaatcagattctatttgaattctttcttctcagggcacacctctgcttactgggctggtgaacagtgacctagccacagggccggcttccaaagggagaaaggagatgcaattggcccacataatccaccctcaaaatgtagagctgaataattcatttcatggcatagaaatagcaatacagtgaagcaattctgtttaacttttccctccctatattttgtgtcctctgtcatggaaatttgacacagtagtatttgctgcccctgctcttgaggataaaattggatgggagtttaagactgaaacgggcacctgtggccttgcagaattaggttacagtttgtgccttgtatttacaaagcgaaaggaattcctagtgccacctgcagaggcacttctaactttcaagctctgtttgccactgtcctggcacctccatcacacttttaggctggagccagagaggtttttgaaaaatcagtagctcccacatcaggaggaagtatctttccagtttgagttttggtagctgctctctttttgtctgagggttctctgggtcctagggctttctcatttctcttgaacaacacctctagttaatttcatgtacctggagtggtagttggaatatttcttcactttaagattttttttttttttttttgagatggagtctcactctgttgcccaggctaaagtgcaatggcatgatcttggctcacggcaacccccgcctcccaggttcaagtgattctcttgcctcagcctcccaagtagctgggattacacctaccaccacaaaatacaaaaatacacaaataatttttgtatttttggtagagacggggtttcaccatgttggccatgctagtctcgaactcctgacctcaggtgatctgcccgcctcgacctcccaaagtgctgggattacagacaggcatgagccactgcgcccggcccaccttaagatttatgtaagattggctcaaaagctcattcctgtggaaaggtccactgttttcctcccaagatttttgcagatatctgcgtgggtggttacttttgactcccatttcctgctgttgttgatagccctcattaaaaccatcacctggaggtgaatagacagtcgagacctatcattcccaaagaattgtcatggagcctaatagttctattggattcacccctttatgttaagccaccatttcagtgtttttcaaaatagatatatgttatctagtagggagtatcttacccccaaattagttgattgtttcaggagggcttttagtgggttccagagaaaatgagcaatcagacaagttgatttagtggaagacagtcactgaataggatgtgtatagggttgtttgggagcaagagtgaaattggtatggaacagagaggctcccaaggcaagcagacattttttttggaagaagcaagtgtttgagagactgtggcttatttttcctttgtgagaggggagttttaataccatttccaaaatatgtaacctggtattttgtccccagaagtactgttgagatttatggaagcaaaaaactctgtcacccaggctagaggagtgcagtggtgctatcaaagcttactgcagcctctaattcccaggctcaagagatgtttctgcctcagccacctgaatagctggcactataagtacatgccaccatgcctggctagttttttttgttgttgttttgttttgctttagagacggggtctcgctttgtgcccaggctggtcttgaactccttttaagtgattatctcttctcagcttcttaaagtcctgggattataggcatggcctatctatttttatgttttataatttcttgtactttttgatgttacttcaaatatctttttaagtatcctaaatatacttatttaaattttttttgagtaaatttatctataaattattgattttatgtcgatagacattgttctctatcattaataatgttaaaaataaataaaaaaacaaaaacaagtaaatcaattaatgcttaccacaggccagtatttgatccaacactaactcaaatattcatttctttaatcctcacaacaaacctatgaggtaggtaccattattgttcctgctttttgcaagaggaaactgagacacagggaagttaagtaatttgcctatggtaacacaggcagtgagtagttgagctgagattgaactcacgctgtccagaatccatgctattagttataatagtgtactgccctatagctttctgtttcacagctacatggcattactttgtatggatgtatcattatttgttaaaccatttaacttatttccagtgtattgttcttataaacaatgaatacctgtgtacctctaattttgtgcacatgtatctttttgtagaatgaattcttaagaaattgagttgctaagtcaatgcttaagcccataattaattttcttacatattaccaactgtcctccaaaaaggttgtaccaatttagaattttaccagcagtaaattcagcagttaggacccattttcctaacactctcgcggacactgggtattaccagtattttttttaatacgtgccaatcaaatgggcaaaaagaatggtttctcactgaggtttaaattgcatttccctagttattcttgagatttttcctttcctttcttcaacaattacttattgagtgcttcatatttgtaagggacaattgcaggtactggaaatgtcacagtgaggaaaagtgacaaagcccctgctgtcatggagcttattctaatgggagatgtcaggtgctcagctgagctgggagagagagagctgagttgtcaggtgtcagaggagccaattatagcagcaaaacaaaaataaaatagttcagcttttaatctcttactacgacggtataatcaagaggctaaaatgggaggaagggcagactctgcctgttccatttccccacatagagtgagtataccagtcgagggtcaggtaatcagtgcagacttagggggtcgccttaccattgaagaagccccaaatgaaaggctctagcagttttatggacctgggggtggaggaatccaagggtggggagaattcatgaggaaaatgaggtgagagggctaggagtggaaaagtacaaagtactgagttagcgtggggaatagtgtctttagggctaggagtggaaaaaatactaggtactgagtcagagtggaaaacagtgtcttcaaggcagggagtggaaaagtgctaggtactgagtccgagtggagaaaagtgtcttctctatgatgaggaggcttcagcagaggtgcctgaagacctcaccccagagcctcagataaagagacctaagaatgagggtgcctgggctaagattgcaagtatgtgaaaaagcatgactggcgggaggctgagatcttgattgcagcccccttcagagactgccatgcactgactgtgcaccaagtctgctgtagaaagggcaacttcctcagcaaggcttgtcagattaagcctctttaattgcctgtggtcaggtctgaaaaatcacacatagatttttaatcagaacccagacatctcaggagagacagacaataaccaaacataccgtgtcatgtcatgtcatgataagtaccacaataaatataagtcagcatgagggacagaatgcccaggatgctatcttcaatagaatggttagagaaatctccctgggaggtagcatttaatgaaagacctacatgaagtgaaggagaagctatgagactgtctggaggaagaaccttctggacagagggaacaacatgagaagaggacttgagacagagtgtgtgatcttttggaggaatgtcaagggaggcagtgtggctggggagagtaagcaggggaaagaggcctgataggtactggggacccaattacatgaggtcttgtaaggccaggggaaggactttggatgtagttctcagtgtgaggggaagggatctggatatatttttcagtttggtggaaggcatcagaggcttctgaacaggaggattatgtgattggagctgtatttttaagggatcattttggcttgagaaactagacccggggacaaggacggagcaggcagatgagttaggagacaattacattagtctcctctacccttttcttaacatattggagttcagctctggctgtagtagttctagatctcctcagacacacttgtgtagagcctctgttgggtattttgggtacacaaatgattcatcttggttatacagatgatttagatgattgtagacagaagagggttgtctggtcattcccagacaggggagcattccttgagatagagtagaggaaggctgaaggggaggaagacagtacctgttgctatctagatagagacatccagcaggaagttgaatacaggtatctgaaactctagtgaaagttataggctggcaataagcacctgggagttattagcttttacttgacagttgaatccgtggggctagaggagaaaaaccaggaaagtatggagaataagaagaccaagaacatgcactcaaggttaccaaaattaaagagtgatttgagaaaattaacaaggaaatcagagattgggaaagaatagagcatttcaatgaggagagatgccaacacttgcatttgacacagcggtcaaatgagttgagatctgaaaagagctcaagccttggccatggtgtgaagtcaccaacaacctttgtcagggagtttcagtagagaggtgggggtgggaggctgggaataaaggcagcaattgctgcttactctttcagggagtttgactccaagggaaagagaaactaaaagcagtagcacaaggtttgtgtttgaagtaatggaggtgaaccaggtgaatagcctggaggccgagtgaagtgagacaggacactgcagatttggaatgtcaccagtccgcacaactgaataatttcctccagaactgctcaattgcccagttgtaagaacagatatgtagaccaaaagtagagtgtccccagggtaaattttatagagacaaaggggtgtgtttattgaagttgtggaaaggaataattacaaagacatactattgttgcattgtccaatataataaccactagccatatgtgactacttaaatttcaattaattaaaattaaataagattaaaaattcatcttctcagtcatactagctatgtatcaattgctcaatagccacaggggctggtggctatcatattgttcagcacagagacagagcatttccattatcactaagagttcttgtggaaaacactgcactacagggtctggataaagctgaggtcttgattaagttgaacaacagttgtagaaggagtaagcaagagcaaaacctggatgaataggaggttgtggacggagattagtatattgagattaagattctagggactgagctgctccaggtgaaaagtttcagggttatgtcataagaaggtggggggcagctgctgaaatagtctgcgggtgtagacctgtggagttgacaagatcaaagaaatttgaggcaaggttgttagactcattcatgaagaagtcacccaaattgttagcaagaccttgcatctaatgccaaaatcctcatttagcaaggtggtagtgacttagtagctacaagcaatgagaaagtcagacacctcaaaaggggaaggtgttgctcaaagtccccacaaagtgtgataaaacaaacagtagctggggctggagcaagtggcttcctttgggtgaagccagatttcactgaaataataacctcagggaaacagtcaatgaaggggttaaagatgtgggagagtttccttgtagtaagtaatggaatgaggctttcaaagggccaagtaaaactttggaggaagtttagtaaaagaaggaattttttttagtacagataagcataggaacataaagaagagataattcttaaacatataagatatgcatttggggatagcagccagggaacactgaagtcccagtggggtcagagacttcataaggctagcaaattacagtttttgagtggcattccaacagtagagtgtattgctcaggaagtccttaattatcctttgaaacaaattccttcagctgattacgaaggcatctagctggattcttgagcgacttgttcctgacatcatagcaacccattgtaactagacttcgaccattcctcttacccaagtgctggggaagggagagattctcaatgcttacccacctatggaatcccagtaagtccagttgctaggtggcttgaggtctggggtcataaaatggaaggcctgaagtcatttggtgatcacagaccttgagccaaactttccccatttagtcagagaaaggattagcagcatcccccatgcctggctctgtgtgagatcatggaagccagtggttggtgaggtgctatggagtataaattgcaaaatactttcagttccactcagaatggatttcaaagtgatttccaccccatggggaggagagggagtctgaggagggatggatggaaaaaaaattttcatgtcattttctgtgatccactctggagacagaggcagagattctctacaacagctgctcaaactatagctcttgttaaaatggaggttctgaatcagtaagtcttgggtggggccagagattccgtgtttcagaccagcccacatgtgacgtgaatctcattggtccatacatcacactttcagttgctaggtgaagaagggagcactcgatgagtggaagagaaagccgttgtaatctttgggagaaggggcctgggtcagcggagttagactggtctgtgagtggacagaatggatgggaaggaaagaagatactgtgaggctctacagaaaaaaaaaaaaaaaaaaatatatatatatatatatatatatatatgtaaatcaagaagacagaagcagctaaagacgaagtcatttccaggtccagaaggcacaactgacagctgagtaataacataacattgactgttaattggcagaatttttaactgtgtgtttggtttctccatcaggtcatctgtcctatattacatgacaatttagactaaaaccagtatttcctcagagacaatgctagaagcttttacagtagggggcactcttgcattacattaagagctcagcaaagaagatgcagaagcctcaggtttgccttgtaaggtgattcataaacacactaaatcttccttaggtctccctttcactgtcagggtacgcatatagattttccttcctccctccaataccggtacgcatcctctacaggtggtgcattttatacctcaagtacttcacagggtcctagtgagtgtagtgaaataggcagtgattcatatttgtgcaaactcccactgatgcctgctgtctgcttccctaagagttcaagaccaccaccaaccccttgattatgtgttctcactgggccactctgtacacagtttagtttgacaagtgcatgtcactgttatctgtccttctattccctctttcaagagaaaccacatcaatttaattactcccccacttagaactcttcaaatgaagctcctctcatctctctcatcaacccatctcctccctttcctcctcaatgtcaacatgccttcacataaatcctgaatgatgaaattttatttagaacttacactaacttcctctccaaggtggcatctaacttcatattaagtaagaaacagccttcccactctccacccccgcacttctcacccaccactgcttactttttttttttttttttttttttttttgccaagtctcaagtaattctgtaacctagaaaaggtcctacacaaaccccgtgatcattcacatttaagtagttgggtggcccacatccttcccacaaaccccaaagtgtcctcaaggactaaagcctttctctcaacccttccagcatgatgtctatggttgtaaaattgtccagggtcagtgcatactgggagcagcaagtttgtggtgcctggggtttccccaatactcccaaagcacatcctcacctgcccatctatgattcattttcagcatttcactcatgtgccttaaatggtcattgaccaccacaatccgaaaacagccatcaaatttgcccagttctctttctgatctctgaaagagcttagagaggtcactgaaaataaaggccttggttcactatcgaagtcatttctaaagcatttgacatccttggaagtgctggccatgggagcagcagtcataggggaagttctgtaaagggagctatttgaatttcaaagatgttactcaacgtgattccccaactaatgaagtataataaaggggggctataatttattaccattatcagcaatcttttcaccatagcagaccaaggaatatgtggatgggaggggaggggaaagcttttggtgatggtgtagaagttatggaacctgtaacagctacagtgatgaaaactaaaattaaggttataggaaggtaactggtgggtgaatgggttgtctaactctactggtttttccctgtcttgcaatttaaattcacagaaccacagtactagaaagacccttggaacatttagtcaaccacttcattaatcagatgaggaaactgaggctcataaagattgcagtttgtacaaggccacacatttagtcagcggtgaagcaaggacaaaggtcctaatctccagatgccaagcagatgtgcacagttccagagcttaatatcttattcttcagcatgattactgataagatagtatctgggtattgtataaagagaaatggaggttttttcccctttcctcttgtttctccctccctaatccttaaccttcttttttaggtgctgctcctctgaagattcaagcttatttcaatgagactgcagacctgccatgccaatttgcaaactctcaaaaccaaagcctgagtgagctagtagtattttggcaggaccaggaaaacttggttctgaatgaggtatacttaggcaaagagaaatttgacagtgttcattccaagtatatgggccgcacaagttttgattcggacagttggaccctgagacttcacaatcttcagatcaaggacaagggcttgtatcaatgtatcatccatcacaaaaagcccacaggaatgattcgcatccaccagatgaattctgaactgtcagtgcttggtatgtggtcaatggtgtgtgttcagattcttagccttctcagatgagactgcaaatgagttagaaaaacactggagggggacttgaggggcccaggggaaaaggggggtctatagagagaaggcagaggacagccacttctgggaagtgcatttgaagggagtgtagagtctgggagtagggaactgaaagtcttttgtactttttatagtctgcttctgaaggatcagtaaaaatctgctttggggaaaaaatagagctaattgaacaaagataatatggctaattacctatagtaaaaaccatggataatttggccatcacaaagtttatataaccataaaggcctcagatgtcttacattcattttttccttgggtccaagatttttcacctactaaatctttgcctggagctcctagcaaagcggacagctgacacatttgggttttcccttcagcctcctctaggttgcttatgagttgtttgctgccacaaccatgagcctggtagacagaagggaaaaaaacccaacaaacataacccacaaacttacaaaccagctcctctgcttcacgagaccttggaaggcctaaatgccactacagatttttttaaaactatcacacagtaaaattatttttttttgttttgatatactgttctactgattgtatagatcttgtatagatttaggtaaccgccacaggacatagagcatttctatcaccctaaaaatttccctcaggctgtcccttcatagagtcataccctgtctgcactcataacccttgttgggcatcctatagttttgtctttttgacagtgtcacataagtgaagccacacagtatgtaaccttttaagcctggcttctttcgtttagcgcgccttcgagattcacccaagttgttgcacatatcgagcttgtccctttttattgctgagtagcattttattgtttatccattcaactcagtaaaagacattgggttgtttctggtttggggctcttatgaataaggctgctgtaaacgttcatgtacaggtttttgtgtgaacataagttctcagttctctagaggaaatacccaggtgtggtattactggatccaggttaatttttgatgaaacttgaaaaggcagatcaacacctattctaaaaccatagagtaaaacagaagcaaaagtaaaaatagaatggagagctgctccctttgaaccctgtgtgatttaaactaggctgcagggctttaggaatagttaaccaagtgctaaatccgtgttttcaaaatgtggtcaggtaccattggaaatgttttaggtgggacacagataagcattttgaaaagccatgttgtatttgttttaatgtatattagaaaaactctaacttacgcaacatgtgatttcacagatcttgttaatgaagctaaacacggtctggcaattcaccttctacaggccacatagactccaagaagactgctcaaatagtacactgatatagcaaaacttataaagatgacatgcaaatgacagaccttttagtaagaatacactaaattataaattagtttgtagaacctgcaaactacctagtaactataaaagaacaagggattttttctgacagaaggcacatgacacaggtctagggactccatgccagtgatcctgaacagccagaaaagtgagaatggcaaaggcaagagaaacactgtgtttattaagatcatgtatttttccctaaaatagctggatttggccttcttcttagagtatgttatgaagacactttgatgctcatgccaaaaatcagtgttctgaatttcgaattccaaaatatccacccactcacttaccacaatcctgcttgggtttctgaaagatatgacgcagggcatctcagcaccatgaactctgtcagttcctggtgagactccagctcaattccttcctgctctcttagtctggggagctggaatgtgccccatgggacacctgggccctagagtcagaccacttctccttccaaagactctactccctggaaacagtggcttcattgtaaatctttggtgactcaattacagccctcctgtcacttagagagcacccctttgatttggataagcaggaagtaagcatggctgcaaactctattgttgaaaaataaacatgaagtcattatgtggcactcaccttgggctgagggtcacattttagacaccctgaggctcccaggtgtgccccaatgagccccagatcaagtacccagttatttgctattccctcctagatacatctaaacttagattgatttttttttatctctcttctgctttcagctaacttcagtcaacctgaaatagtaccaatttctaatataacagaaaatgtgtacataaatttgacctgctcatctatacacggttacccagaacctaagaagatgagtgttttgctaagaaccaagaattcaactatcgagtatgatggtgttatgcagaaatctcaagataatgtcacagaactgtacgacgtttccatcagcttgtctgtttcattccctgatgttacgagcaatatgaccatcttctgtattctggaaactgacaagacgcggcttttatcttcacctttctctataggtaaagctgttttccaagactatttctttcagcaggtattatacacaaatgcttaaggcagatcatccaatgtccccgacttgctaggaaacctccaactgggccattttatgacgctgttaggaaggacccagatggaggtctcctgcttctcctgagtgatgcagggtccaggaggctacgagcctatgttgcacttgaagaaatatgcttttagccctgaaactgactcagtctcttggtttacctttggatggaggattctgaagttttgatttaaaaatacaggattcctccaggctagaattctttctttgattacaacacatacatgcgcttgcacacacacacacacacacacacacacacaccatgcatacatgcagacatacaaatgatatttattgtgagtatagaaccatttgggacattattggtcacaggagtgaaaacaaaaagatatgacaccccctctgcccttgaggaccttccaatagaatcagaaccctgtaatgtgcacacatgaaaaactggatttttaaaaggttgaattggaatctaaattttattccatggaaatatctgactaaatttaaaataaaagtgactggtaatgagatttatgggcattcagaggtaggcaagatccctgagggtcagggaatggttcctaaaggaaggggtaccttgtaacatgtaaaataaattattggggttaataaatgtggtgaggaggggagggcattctggatgacaggttcccaaaactgtggtgacttccgtagctgaaaaaatttgagacagtatctgggctaagcaggtgagaggaccacagtggatcagctgtatctgacgtaagtgcaggaggtatgtcaaagaaagccttggaggcagaaatgcttgtgtgttcacaagtattcttcagggacaagttcagtggaggaaaggattgaaactaagcagtagccactaataggagcctgacattttaaagtcctggctttacccaggagggcatgtgtctatatttgactcctcttttaagaagctgtaactgcaagattccctcctggaataaaggtggtctgcatctaccctgtcccatcactgcctgtgctgaccttgacacccacatctgccttcttcttaccttgaccccttctccagcggtgatttcttggcttgccccctccagtgacatccatccaactccttgctccataccctggctttgtcacctcctttctcccagtgtcttgttgttcagatataacttggtctgtgaacagcccacggggccagtccccatgaaccaactttacaactgggccaatctcatctcctgctactgacttcttcctattcagacacttcagcctctgagaatccagtaaatggtggagccaactcgtcctgtcccagttgcttctcctgtatcctctcttggccagatagaagcctctccaagctatgcctgaagttcagtacctccttcaatgtgtaattagtttgattggtggccacaagatggccatatatgacatgccccagggccctctgttacggctcccatagtctacaaattaacaggggcttgccaccactataacctcatcatggctcaccttcctgctgcttctcaactactgttctgccaaacttcaacaggtacccccatcttcagaaatgtttcagctctagctgcctcaggaagatggggcttgcctctctgggtttcccattctatcgcttgatcagagataggttagaccctgagtcaaggggccttttttgcatgttaaaaggtagcagcctccacgttagtaagtataacccctaaccccctttactgggagtgccaaactggctcaagtggaatagactgggacagactcaaaagggattaaatatggcctgcaatgccaacaacttcttaacatcccagaaacagggcatgtgtctacaaattatagctaagctaatagatcagctggtcctaattttcctgaaatttgggattagctaccagaactgttcccaaaaatgtctttaaagtgggcgactccgttctaagttttccccacaaagcctgttttccaactccccagaaacttaggagttctcatgtaaggaagtagttcctgaaggcgtgaaggttcctcaaggcatgaagaaacatcaaaggtttttcagtagatgagatatgctgaaagccatgcagaggaaacctgctgtgacctcagtaggaaaaaactaaacaaacaagcaaatgaaaactagaggtaggggcctgtggaagctgttccatttgtccaagtgagaggtgtctggagattatagtggacagaagaatcatcacgagaggaacttcagggcctgggaactgactgcagaggggggcaggatagcaggcacggcacaaatgactgcacgtgcagagcctcagcacagacacctcacccagattccagaatcacgggccaggctgaccctcttcttcctgatcatggtcggtgttatccccacctccatgaaggcatggcagctcagtccaggcatttggccagaggcatgggctcgattcttaggtcgctgctgaggccctgagcctgggactttctatggcctcctattgtggatttcaggcttctctggccttagagccctggggagaggctggcaggtaaataaagagaagagcagctagcagaaaccttttgtaaatgactctcctggctgattgaaaatttgtggtcatttgtagagcttgaggaccctcagcctcccccagaccacattccttggattacagctgtacttccaacagttattatatgtgtgatggttttctgtctaattctatggaaatggaagaagaagaagcggcctcgcaactcttataaatgtggtgagtgagtccttgtcctccccacagactgtcactttgcacctacttcccaatcggctggctgccttccggagcttgttggctgagcctagactggcaaaaagtcaggaagttgttgggaaaaaaggttttcccttggagttttgagcctatacagactggcagtagcagataatgctgctcttggacttcaaagaaaggcgacatttctaacctctggtttacaaatgtacttctggtttccagggaaaactgattattacttgctttatctacctcacttcatgaggttactgtgacatatacataaagtaaaatggtgaaaccactcctaaatgttaaagattgtggacctggtggtgtttaagcagggatatttgctaaatgaccacaagaatcagcttctcgtctctaaaaaaatctaggtttcttatgaaataagttagatgaattattgcccattgacttataacaaacaatattaactttaactaatttctaagtaatacatatccattatcatatataccaaaaataaaataatctataactccactaataagaaaaaatgattacacaaatatttttggtgcctatctttaagatttttctgtgtatcaatctatgttgttttccataattaggattatcataagggttatttttcacaatttggataatatatgtactgtgttctaattttgttatactaaatgtagcaagacaattttcaatgtcataaatatcattctacagcatcatttttaatggctgcaagatattcccttttgtggatacaccataatttatttatttaaccaacctcattttttggacacttgagttagtccaatagttttgttattataaacaccctccccactgacttctgttataaaaatgtttcatggggacaaagtggtccctaactttataataatgccatgcctttttgtagtttggtctggttctaagctaagattggactttatctcagtaattgcctccagtagtaattagtttgattggtgctaataattaaggtaaccttctaactcacttatggtagaaagcacaagatgagtattgcctctggccagcatcttgtttttcagtatactgattttaaaatctaactagaaaatagatggatgacattagcagtcattcaatgcatcctgctgtactttaaaaataagaaattggggagcaacgatcgaatttaaataaattaacacaaagcatgtggcagagccattcaaactgccaatgtatggagtgtgctgcgagatttctatgatataaaagtataaaattcctagcacagatgtaaagacatatcatgcttgtccaggctttgacttttcaaggtgagagttttgagcttcactttctttcaacctcattgccatttaaaattagtcaaatatgaagaagtgacttacatcttgggaataagctgtttgctagatttttcttcacattagaatgatcagcttacaaatgaaacaaagaagggttggagaaaaagattaaggatgtttcttcctccatgaggcaatcagaaaaaaatcaggagactagataggggagataaagaggatatgtgtgttcacatgagagaagttagaaggtggttaaataagctctgtaggtacagatgagatggtcagattgggctgagtggcacatacatgacccctaagaatgtaatgaagaatattggtaagaaaaagttatttattcagacagtcatccatgccactgagtttgatcaaagagagaagccttgctatcactgtagggagggaggtgcaacaggtataactatgccattatagatatgatatatttgtaaatttggattctgtaacttcagcaatatctgccattgctttgtgggtactcctggcattggctatgtgataggtaaaataatgccccccacaagacgtccacctcctatactccagaacctgtaatatgttatcttacatggcaaaaggaacttcacataggtgattaaggcaccaagcttgagatggtgagattaacctggattatccaggtgggcccaatgtaatcacatgagtcagagaacctttcctagctgggatggagaaatgaactggaagaaggagagatctgaaacttgagaagctcaacccagcatttctagctttgaagatggaaggaggaagccatgagccaaggaatgtaagtagcttctagaagctggaagtggctctcagttgacagccagccattaaggaaattaggatctcagttctgcaactataaggagctgaattctgccaagagaccaatgtggaaacagcagatccctccacagagacacaagcttactgataactggtaggaatttctccaaaagtggagcttcctcctactccagtgttaatccctttctcagaggagacggtcctcaaactaactaacttggcaccaaaagtcctatccagtgttttctcattatagtttttctatgcctcaactgtatatatttacccagtttaggctgtttaaatgaataaaaaggaaatgccatagttattctagccagtttccaatctctcttctctttttttgttttgtcaaatagggcagataaggcatgagaatttataactatgaattactgtcttttcccaaacagaaatcaccctatcagcttacccattgggagaaaaactaaaatagctccccctgaaattttacttcctcatttgggtcttgtgtgactgaaatctgtatacaatgccctagcaacaacggtttttacagcttgcctccctagaacaaacctaggagtctcagctgtttcaggaatgatttcttaaaggtaaagtgcctttttcaaaagaaattattattatttttttttaattttttttttgtgtgtgtgtgagacagagcctcactctgtcaccaggctggagtgcagtggcacgatctcagcacactgcaacctctgcctcccaggttcaagcgattctcctgcctcagcctcccaagtagctgggactacaggcacgtgccaccaagcccaggtaatttttgtattttcagtagagatgggttttcaccatgttggccaggatggtctcgatctcttgacctcgtgatccgtttttaaccaacatttaaacagaaatattcacaggcttaaagactgaaagttagtgatatcatcacatttccccttcaaaatgctgaatttgtaagcaaatttaaaagtttagaatctaccttttaattgtctgctttcatttttttgacagtggctttttttgatatggtgactattttgtcatgggtataaaaggataattcattttgtgttaatctgaagacatctgaaatactgtattcaactataagtacctttttttacatttataagattctttttcaaaatttttatttgaatagttttttgggaactactgaactaaactaggtggtttttggttacatggataagttatttagtggtgatttctgagactttggtgccacctgtcactcgagcagtgtacactgcaccagtgtgtagtcttttatctctcacccctcccactctttcctctgagtccccaaagtccattatattattcttatgtctttgcatcctcatagtttagctcccacttatcagtgaaaacatacaatatttgtttctccattcttgagttacttcacttagaataatggtctctggttccatcaaagttgctgcaaatgccattattttgtttctttttatggctgagtaatattccatgagggatatttaccacattttccttatccactcatgggttgatggacatttaggttggttccttatttttggaattgcaaattgtgctgctataaacatgcgtgtgcatgtgtctttttcatataatgaattattttcctttgggtatatacccagtagtaggattgctgaattaaatagtagagttctacttttagttctttaaggaatctccatactgttttccatagtgtttgtactagtttacattcccaccagcagtgtaaacatgttcccttttcaccacatccatgccaacatctattattttttgattttttaataatggccattcttgcaggagtaaggtggtatctcatggtggttttaatttgcatttccctgatagttagtgatattgaactttttttcatgtttgttggccatttgtatattttcttttcagaattgtctattcatgtccttataaacaccattatttttaagaagaaactttacaaaaatagaacataaccagatttataaagcatctgggaactcagtcaattaagaaatagctcaagtaactgatgatgcttcacctgaaagaaggcctggagagaacagagatactgtcttcaaatatctgaagagctaccatgggatgcaaagattgagcttgatggtatgactctgaagggcatctctatgaatgaaggttatgagagggtataaggaattaagagagacttttctaacaattaaaaggtcttttaggccaggggtggtggctcacacctgtaatcccagcacttttggaggctgaggcaggcagatcaccttagatcaggagttcgagacccgcctggccaacatggtgaaaccccatttctactaaacatacaaaaattagctgggtgtggtggcaggcacctgtaatcccagctacttgggaggctgagagaggagaatcgcttgaacctgggaggcagaggttgcagtgagccaagatcacaccactgcactccagcctgggtgacagaagatcaagattccgtcttaaaaaatataaataaataaataaataaataaatagtctttaaaattgtatagaagaagtagacttctgcttcctccaacaaaggattaactgctataggaattgccctctttccataaacaactagaaagcagacaaaatatatgaaacaactgttttcagagatcggatgacagacagcagaaaactgtagtccctgagtgaaggaaagaaaaaatgagataagccctatgattgctctagtttgctgcctggagccagtgtccaggcccctctgaaggcaggggagccctgatactgaactaggaaaagacattgcaagaaaagaaaactacaaacatctctcgtgaaatgcttaacaaaattagcaactaaaatctagcaatatgttaaaagtataatacatcatgatcaagtggggtttattcaagaaacacaggtaagctcaacattcaaaaatcaggcaataacctttactacataaataaactaaaaagaaaaaaacatatgatcatgtcaatggatacaggaaaaacttttgacaaaattaatacccattcatagttttaaatggaaagaaaagctctcataaaaataggaatacaagatgacttcctcaacctgacaaaggacatctaccaaaaattcttctgttagcataatatttcatgatagaagactgattgcttttaccttaagatggcgaatgtggggaggatgtctactctctctacttttgttccacattgtactggaggtcatagccagagaaacaagactagaaaaagaaataaaagacatacagattggaaaggaagtaaaactgtcttttttcacagataatgatcatgcttgtagaaaatcctgaggaatctatcaaaaacctattaaaactgataagtgagtgtagcaaagacacaggatacaaagtcaatacacaaaatcaattatttctatatactaacaaaagcaattgtacattgaaaaaaattaatagcatttataatagcatcaaataatattaaaaacttggaaataaatttaacaaaacaagtacaaggtctatatactgaaaactatacaatattactactggagaaattaaagtaaaccaaaataaatggagacataggccatgtttatgaatcagaagactagatgttaagataaccattctctccaagttgatctatggattaaatgtaatcacaatcaaaatcctggtaagctctctaatagatactaaaaatcttactcgaaaagttatagggaaatgcaaagaatctacaattgccaaaacaattctgaaaaataagaacaaaggttaaaaatacaaaattagccaggcatggtggcgcatgcctgtaatcccagctactctggaggctgaggcaggagaattgcttgaacccgggaggcagaggttgctgtgagctgagatcgtgccattgcactccagcctgggcaacaagagtgaaactccctctcaaaaaaaaaaaaaaaaaaaaaaaaaaagaacaaaggtggacttaacctacctaatttcaatatttactatatatagtaattaatacagtgtgatattggtaaaaggacagacatatcagtcaatggaacaaaatagagagtcaaaaatagattcacactgttgacaaagctaccaaggtaattccatgcagaaaggatagtattttcaacaaatagtgttgggacaattagatatccacatggaaaaagtatgaacctagacacacacaaagtaacttatatattaagaattaaaatgaaaggacttccaaaagaaaacagaggagaaaatctttgtaaccttaagttaggcaagtcttcttagataggacacagaaagcaaaaaccatatcataaaaagataaaatggatgtcatcaatatggaaaacttttgttctttgactttgtttaaaaaacgaaaagtcaaaccacagacagggagaaaacgtttgcaaaatatatatctgataaaggacttgtatccagtatataattacatattgctactcattagtaagaagacaatccatttaataaaaggcaagaagaagagacttgaacagatacataacagaagaagatatacagatggccgatgagcacagtcacaacatcattagtcatcagggaagtacaaattaaaacgataatgagataccactgcacaccctctagaatggctaaaattaaaaggtctgataaacatcaagtgttggagaggatatgaagcaactgaaactctcatatactgctatacaacccagaaatcctagacatttaccaaacagaaattttaaaaaatttaaaaatatataaagactcatacacaaatgttcatagcagcttgcttcataataccaaacctggcattctaaattttcatcagttggcggtggtatatttatacaatgaaatactgcaaagctatagaaaggaatggactactaataatacacaagaacatagataaatttcaaaagcattatgctaagtgaaacaatccaggcacaagaagaatacacattatacaatttcatgtatatgaaatttgagaaaaagcaaaactattttaagtagattcatggttatccatgggatgggggaaaggaatcagctgaaaagcgaactattttggcttataaaaatgttctcgatcttgattgtggtggtggttacgtgactatatatattcgttaaaatcaccaaactctaaactgaaaatgattgggttttattatttattaattatacctccataaagctgattgtttttatcttttatttttattttatttcaatagtttttggggaacagatggttttcggttacatggatgagttctttagtggtgatttctgagattttgatgcacctgtcacccgagcaatgtccactgtacccaatgtgtagtcttttatccttcatccacctctctctcactcttccccccaagtacccaagtccattatatcattcttatgactttgtggcctcataaaagctgattgtttttaaatacacacatacacacataaaagagaacttccagtgacaggaagtgttcaagaatgctctatttagtaaagacagaatcacaaaaccatcagaggtattgttgagtggattcttgtggtctataaatacctccatggacacccaggttagcaacctgttggagtttacgtgggacaatagcatcatcacaacagtcagcctagagaaatttacatcccaagttgtgtcagtagcaagtccctatcaatagcaactcaggctttgtgaggtctagctggctagaaatttcccacttggccttgcccatgcaacattgtgtaatattcttagcaccatctggctagccgatttaggcatcaacatcttcaagacttcttctcctcctccttataaaccttgctttcagaaaaggattagaaactcttccaatcacaaaatgattgctaaaactaaatatattacccctcccaatggtattttttggttagccaggatagagatataagtgaaaaatctatttccagtgttagaatttaaggcacagtgagaaagggaaggcatatactttttgaatgcaagaaacttcttcccaatccccctgaaattgcatcatttgagtaactatctcttccatatataaagtcacaacaatttctctctcagtcccagaactttgaagccttttcaaactttccttcttttggtatctaggaggaatacatttttgaagattgttcttggtgtctttcaggaaccaacacaatggagagggaagagagtgaacagaccaagaaaaggtaaatcctgaccctgagacattgatgagagagaggtataatccccagagtgcctgttacttgaataggcttatgcctaacatatgttgagacctcagcaaacctgaactaatggagagggagaggaaaataaaactagttaagaactggaagaaaataacctgataatggatgacagggtatccaatgcacaatgcccagaaagcatgacaagctctgtcatggtcaagtaaaagtcaataccaaagacttcagaggtggtgaacatgggcttcatcttatctgccacagtaaccccagtacctggcacagtgcctagattagtgggcatcctacatgtgtggaatgaataaatgaagaagtggggaatgataacatgtttgcttcagcctgagcatcttagtatttgctatggccctgtttagatgttcttctgccacttctttacctcattcttcagatcttgcctcaagcagcactttcttaaaaaccctttcccaaactagaaaatgtcaacttgttacagtgtcatgtggatcccttggctttttcttaataacaccagattatgcttacatatttgtgtaattatcttattaaactctataaactagacttaactaaatcctatgaagagcagagaccataccagttaagctcatcattgtgctgctagcacttagcatggtgcctggcatatagcaggttctcaataaatgttgaaagaatgattgatgcatgatgaatacataaaagttcgtggtgatcagtcctttcacaacgtgaagctatcagatagtctgtacctctatccctcctgagaaattaagctctcaggaatatcaaggctctgactgcatacccataggatcaaagcaaccctcagtcacaagcctggtttcagagatagggtcataacccccagggtgcagagacaaccgagagtacccagcactaatccagatataccagccactgtgattctagcaacaaaactaataattccgggcacccttggacaatgagaaagggtgctgaaatcctgcctaccctgtcacactcagtttcagaaatggtctggaagagcctgcagagggcaggcagcagagaaccggcagagggcatgggaagggccaggcagaaataaagggtagctcttgaagcatagatgacagtgtagaccgtggttcttttctcttgctttctccacctttctcttcaatagtttgtttctcctcattgctgttccaatggcaacctctattctgccctatcattgaaatctagaaaaagaaagtagctcaaatgtgaaatatcacctaatcttttcttctatttctccagagaaaaaatccatatacctgaaagatctgatgaagcccagcgtgtttttaaaagttcgaagacatcttcatgcgacaaaagtgatacatgtttttaattaaagagtaaagcccatacaagtattcattttttctaccctttcctttgtaagttcctgggcaacctttttgatttcttccagaaggcaaaaagacattaccatgagtaataagggggctccaggactccctctaagtggaatagcctccctgtaactccagctctgctccgtatgccaagaggagactttaattctcttactgcttcttttcacttcagagcacacttatgggccaagcccagcttaatggctcatgacctggaaataaaatttaggaccaatacctcctccagatcagattcttctcttaatttcatagattgtgttttttttttaaatagacctctcaatttctggaaaactgccttttatctgcccagaattctaagctggtgccccactgaattttgtgtgtacctgtgactaaacaactacctcctcagtctgggtgggacttatgtatttatgaccttatagtgttaatatcttgaaacatagagatctatgtactgtaatagtgtgattactatgctctagagaaaagtctacccctgctaaggagttctcatccctctgtcagggtcagtaaggaaaacggtggcctagggtacaggcaacaatgagcagaccaacctaaatttggggaaattaggagaggcagagatagaacctggagccacttctatctgggctgttgctaatattgaggaggcttgccccacccaacaagccatagtggagagaactgaataaacaggaaaatgccagagcttgtgaaccctgtttctcttgaagaactgactagtgagatggcctggggaagctgtgaaagaaccaaaagagatcacaatactcaaaagagagagagagagaaaaaagagagatcttgatccacagaaatacatgaaatgtctggtctgtccaccccatcaacaagtcttgaaacaagcaacagatggatagtctgtccaaatggacataagacagacagcagtttccctggtggtcagggaggggttttggtgatacccaagttattgggatgtcatcttcctggaagcagagctggggagggagagccatcaccttgataatgggatgaatggaaggaggcttaggactttccactcctggctgagagaggaagagctgcaacggaattaggaagaccaagacacagatcacccggggcttacttagcctacagatgtcctacgggaacgtgggctggcccagcatagggctagcaaatttgagttggatgattgtttttgctcaaggcaaccagaggaaacttgcatacagagacagatatactgggagaaatgactttgaaaacctggctctaaggtgggatcactaagggatggggcagtctctgcccaaacataaagagaactctggggagcctgagccacaaaaatgttcctttattttatgtaaaccctcaagggttatagactgccatgctagacaagcttgtccatgtaatattcccatgtttttaccctgcccctgccttgattagactcctagcacctggctagtttctaacatgttttgtgcagcacagtttttaataaatgcttgttacattcatttaaaagtctacattttctgctttggcttcaagagtactactcaacccttgtggtctgatgttccctgctctgtcctctgaatgtacttcctttctctttacatctctatggctagaagcctctcacgcatcctgtatcttctcctcctcccttttccctaccattatttgagaaaggaggcttgtatacttctatatgtttatctcagtaataagtcataaaaaatcaagtaagaatggttgtttttgaggacaactaagaaatctggaataaggaagggaagcttacttttgagtttgtaacctgtagtgtgtaattttttaattatgtacttacatgtacattaaacaaaagcttaatgtaaaaatattccttgaaaacaccatgattataaaataaatgcatatatacacatacagcatgtgagaggagccaggaaaactctggaaaaaagaaaattacctagactctgtgagggcaggaatgtgtttaatttctctccaatggatcctcagacaactaagatagttgtctattctattgtccatctttttgtcttttgttgtatttcttaaagattccctcaactttatcttctaacttctgttgtatttttatttctgctatcatgtattcttttcagaattcttttttgttctctcaaaacatatctgtttaaagattgaatgaaatattaacatgccctttggtgagaacatccctcctttgtatattaaattctctgaactgctgtattctaagactaggggaaagaaaaagaaggttgaaagaggtcattaggcagaatagtactagctaacattatttcacatttaccatatacccgtcactcatctaaacctttaaactcattatcctatttaatcctcacaatgaccctgtgacgtaggtaatggaatattatgcccattatgctgatgagaaaatataaacacagagataagtcagagtaatttacccaacattgttaactttgtaagtggcagagctttgtaacaggcagaggttggaacagtttggagggctcagaagaagacaggaagatgtaggaaagtttggaacttcccagagccttgttgaatggctttgaccaaaatgctgatagtaatatggacaatgaaatacaggctgaggtggtctcagatagagaagaggaacttgttgggaactggaataaaggtgactcttgctatgttttagcaaagacactggtggcattttgcccctgccctagagatttgtgggactttgaacttgagagagatgatttagggtatctggtggaagaaatttctaagcagcaaagcattcaagatgtaactttcgtgctgttaaaagcattcagttttatgtattcccaaaaatatggtttggaattggaacttatgtttaaaagtttggaaaatttgcagcctgacaatgtgatagaaaagaaaacccattttctgaggagaaattcaagccagctgcagaaatttgcataagtaacaaggagccaaatgttaattgccaagataatgggaaaatgtctccaggccatgtcagaactctttacagcagcccttctcatcacaggccaagaggcctaggagggaaaaacggtttcctggccaggcccgaggccttgctgctttgtgcagttttgggacttggtgccctgcatcccagccatggctaaaagaggccaagatacagttcaggtcatggcttcagagggtgcaagccccaaggcttggcagcttcagcacagtgaacctgcaggtgcacacaagtcaagaattgaggtttgggaacatccccgtagatttcagaggatgtatgggaacacctggatgtccaggcagaagtttgctgcaggggtagagctctcatggagaacctctgcaagggcagtgcagcagggaaatgtggggttggagcccccacacagagtccccactggggcactgcctagtggagctatgagaagagggccaccatcatccagaccccagaattgtaggtccaccaaccatgcgcctggaaaagtcaccgacactcaatgccaacccatgaaggaagtcaggagggggctgtaccctgcaaagccaaagaggccaagctgcccaaggccatgggagcccacctcttgcatcagcatgacctggatgtgagagatggagacaaaagagagatcattttggagctttaagatttcactgccccactggattttggacttgcatggggcctgtagcccctttgttttggcaaatttctcccatttggaatgggtatatttacccaatgcctgtacccccattgtatctaggaagttactaactttcttttgattttacaggctcataggcggaaggtgcttgccttgtctcagatgagactttggacttgggacttttgggttaatgctggaatgagttaagactttgggggactgttggaaaggcatgattgtattttgaaatgtaaggacatgagatttgggaggagccaggggtgaaattatatggtttggctgtgtccccatccaaatctcatcttgaattgtagttcccataatctccacgtgttgtgggagggacccagtgggaggtaattgaatcatgtgggcagttacccccatgctgctgttctcatgatagtgagtgagttctcatgagatgtgatggttttataagaggcttttctgccttttgcttggcatttctccttcctatcatcctgtgaaagaggatatgtttgcttccccttccaccatgatttaagtttcctgaggcctcatcagccctgctgaactgtgagtcaattaaacctccttcctttataaattaaccagtcttgggtgtgtctttattagcagtgtgagaaggaacaaatacattaacccaggcttgaaagcaaagagtcatctctgatgactgcattcaacctttccctcagcacccactgctcaccccttcgctcctgcctcattctgttatcagtcatcactaggccaggaaagcattcctcccactttcacacccacctcttattttctcattcaggaccttttttattcataccaaaaacatgtcagtcacctcccaactgatcccagtctcctatctctcttacccttcattctgtccaacacaccaagagaaacaagaaggtaaatagtgaaaaggtctccctcacattccctttccctagccacacaactctgatctccagcttcctgggtatccattcgtagtcacagtatgcctatttttaagtgtgtgtacacacacatacacatattccccttactcaggcagatttggttttactttacactacagtctaaagaaatcagaatactcttgctaggatgattgacatcagtcttcagtgtaatccttcatattaaaaacatacatctgtatgtataagttttcattctcaccaatattctagcatcattgtggatcttataataaaagtgagattccattggattttattatgtctacctgttcacttcagaagaaaagatacttacagatatagaatccttcactgtccttagtcacaaagtttaaaacctgctccaatctgaacaagttacaccctaggtctggtgagcaacagttaccctgaagggatctcccaattcctatgtccatatagttgtctttcttgatttaccccctcactttggtggtgcatatccttcagtagcttgatccagcagctttctgagaaaggatctgtgggaaatatatttaatgaaattttatgtatctgaaaatgtctttatcttactttcctgcttaactattaataattttgcttggtataaaaatttgggttggaaattattttcattgtccatagtttccagtgttgctcttgagaaatctacaaatattctgactccttatctttttacatgaaagcttttagaatctgctcagtgttctaagattttgtcatgaaatgcctgtttgtccattgtgattaacactcagatggacttttcttctggaaactcatgtcctttcctccagggaaattttcctgaattatttcattgattatttttcccctctatttcactagtctctcattttagaatgtcagattcctgaatgttgaatctcctagactgatcctccaattttgttattttctctcctgttgcccatattttgttttttgttccatttcctagagattttctcaagtttatcttccagcctttctgttgtactttttacttctgctatcatgttttattttcagagctcctttttgttttctgaatgtttctttttgcaaggagcctgttcctaatggttgaaatattatctcttaactctcttaggatattaacgattaggttgtttgtttttaaagttttatattccaagttatttcttcctgtttgtttgctttgatctatatcatccatgttaaaggattcccagctgtctgatgatacttgactgtctgttcacaattaagagtgaaaaactaaaagtttggaggatctgagtttatggatgggtttgtcaactttagcttcatggtagagggatctggagcaagacatttttaggaaatcatttttagatcttcttttttgagctggtaatttttcagtatcttgcttggaaggtagaggtatagctgctagtattttgggagccaagtgagagaagaggggtgggtgtgagtagtgatggaacctctgcattccttattcagtatgcataaatgtacttactccatgtgtttttagtacgatagccctatcgtacttgtagcatgtggcaaagtggtttctcttcccgtgacctgattataacattgattcagattaaacattgtgaactcagtttcctaaatataccaagtacaaagtaaaagtcactaaattgtcctaacagtctactagaaatggaagaaattcagaaagcaatgaggagaaccttcccattgtatgtggtacatgagggcagagaagggagtaattcacccaacaccaaaaagagccatgaccagaactcaggttcctgatttttcagtccagggttcttcccaccccactgtgcccctctaaacttcttgttaactggaagagctggaaaatgggtgtcaacagagcataatgaaggaagatcatggactttaggtcagatagacctgacaccactacacttgactgtgtgaccttgggctaattacttaatctctgattttcagttttcttatttgtaaaatagggataataatatctacctaccttacaggatcaagggcaatccaaaagataaggattatactgtttaaaaaaggaaaggaaagaaaaataaaagagccacaacaaacaagcaattgggtagcttgtttcaacagggtgggcttgaggatggtgagtgagaattagtagtgggaggatggcaacttcatgtgaggctgatgtaggaggagttgtaggttgggctgtacatggattaacaggcgtgggcttggattctttcatataacactcagcccagaagtcttccaaacaccctgctgaaagccagaaatgctcctacaactcctcctgcatcagcctcacatgaagtcccactctcaggatctcaacttagggactgagatgattcatgctctcaccttatgcacgtggaacttttccaactttaccttctgagaccaaagccaagttcctgggacctttatctttcctttgtcaagattatttccagacaatcaataatatctacttctttgtgaagataacaggaagctcattccttactaaatataacatgaaattctaagcagttaagctgagaataaaaaggaccaaaggctcccagttaatatttcggaaagcccttgtcttgaggagcagccatgtagaggatggtttgtatcagggagggccgtgcaaattggaggcaggtataccaattaggaaacagacatagttagcctcaacaagtttggcatttctaaggagctgaactagcagaagcctcctgaaatttctagattagatcctggtgcccaggcttatcagaccaggagcagggcaaagtagacttcataacaaaagtaaactcaaatcagagggaaatggaaactaacaggagctgctttattggagatggaccacaggagctttctgcactcaaatgatatggggaaaaagaaatcctaaaatataatgttggaaaagttggatagcccaggcatagctagcagattggaaatagtattaggaatcacagttttttacttagtcaccatgttgaaaagatccttttctttagcatagacccagcacaggggtgaggtaggggctaatttctggcatgagagaccagaggcacagagtatggagcaagaagcaggagctgattgctttcagatcactaactgccaaataattaaaacattttcttaaattcatattttgcaacccagaacatatacctgaagcttattattagaacatattagggtatagttacaatgctaactggtgacacaaactagttacatgctgtttccaccagtctatctgccactttttaactacacacatcaagtatttgcccccaggtttcaggtctcaacctctgtaagaacagttgagctgtgtccacttgacggaaaaacaagtctattacactttttgtttcaaaaagtcaacccatccaatcaaataagttcctttacacatattttaaaaaacacatttactagctttcctccaattttcaatgtgtttattgaactctcttggagttacagtctgggagtatttttgagactcctgttatcaatttaaaaagaaaagaaaaggaaggaatgcttttttaaaaaacaataaatcttgttcctgtgtctaaaccagccatgcatattaacgtgtgtgacttctcagagtttaaagtgttttagctgggaaaaaatatattgtagaagacttaaagaaacaagatggcggccgggcgcagtggctcacgcctgtaatcccagcactttgggaggccgaggcgggcggatcacgaggtcaggagatcgagaccatcccagctaaaacggtgaaaccccgtctctactaaaaatacaaaaaattagccgggcatagtggtgggcgcctgtagtcccagctacttgggaggctgaggcaggagaatggcgtgaacccgggaggcggagcttgcagtgagccgagatcccgccactgcactccagcctgggcgacagagcgagactccgtctcaaaaaaaaaaaaaaaaaagaaagaaacaagatggcatagcaatgagaattttaagagttttcattctccctgagaaattacttatatggagaacttattaggagtggtttatttgcagcaggaaatacagttatgatataagaaaactcttgatcatcagggtcttaggcattagaaacactcagatgctataatcctatatctagaaaaccccatagtctcttccaaaaggctctggatctgataaacaacttcagcaaagtttcaggactcagaatcaatgtatccagggtacaaagtaacatttttatataccagtaacatcgtacataagtgccaactcaagaatgcaatcccattcacaattgccacaaaaaaaataaaatacagctaaaccagggaagtgaacaatctctacaatgagaattacaaaatactgctgaaagaaatcagagaagatacaaacaaatggaaatatatcacatgctcatagataggaagaatcagtattgttaaaatggccatgctgcccaaagcaatttacagattcaatgctattcttatcaaacaaccaatgacatttttcacagaattagaaatatctattctaaaattcagatggaattcatgcaaggcagatgagcctcaaattggggcttatcctgggagagtccttggctttgctcagtaaagaattcaaaagtgagttggtggctcatgcctgtaatcccagcactttgggagtccgaggcgggcagatcacgaggtcaggagatagaaaccatcctggctatggtgaaacccggtctctactaaaaatacaaaaaattagccaggtgtggtggctggtgcctgtagtcccagctacttgggaggctgaggcaggagaatggcgtgaacctgggaggcagagcttgcagtgagctgagatcacgccactgcactccagcctgggtgacagagctagactccgtctcaaaaaaaaaaaaaaaagtgagttggtggtggaagaaaacagctttactgaggtggcagtgttacagctctgtgactgctcctgcagagcagggctaccccatgtgcagtgtgctgagagcagtagctcaaaggcagtgctgcagtcatatctacttttaattacatgcaaattaaggggtggattatgcagaaatttctagaaagagtggtaacttctgggttgtcaggtcactgccatgaaaaggggcagtaacttgcaggtgttgccatggaaattgtaagctgacacagcacactggtgggtatgtcttatggaaagctgcttgtgccccatccctagggcatgtctcaattgagctagtcctcaatttggcctgatgtctgagcccagagtccagtcctgcctcccacttcagaatcaaaaaggagccgaaatagccaaagtgatcctaagcaaaaagaacaaagccagaggcatcacattacctgacttcaaactatcctacaaggctatcataacccaaacagcatggtactgttacaaaaacagatagaccaatggaacaggttagagaacccagaaataaagccacacacctacaaccatctgatatttgacaaaatcaacattaacaaacaatgggaaatgattctgtattcaataaatggtgctgggatagctggctagccaatatgcagaagattgaaactggactcctacgtttcaccatatacaaaaatcaactcaagatggattaaagacttaaatgtaaaacctaaaactataaaaccctagaagaaaacctaggaaatactgttctggacattggccctggcaaagacttcatgatgaagactccaaaagcaattacgacaaaaacaaaaactggtaagtgggtcctaattaaactaaaaagcttctgcacagcaaaagaaactatcaacacagaaaagagacaatctacagaatgggagaaaatatttgcaaaccatgcatctgacaaaggtctaatattcagaatataaaaggaacttaaatcaataggcaaaaaccaaacaaccccatttaaaagtgggcaaaggacattaacgaacagacagttttcaaaagaagatatacatgtagccaacaagcatatgacaaaatgcccagtatcactaatcattgtggaaatgcaaatcaaaaccacagtgagataccatctcataccactcataatggctactattaaaaagccaaaaaataacagatgctggcaaggttgcagagaaaagggaacactggtacactgctggtagcagtgtaaattagttcagctgctgtgtaaagcagtctggagaattctcaaagaacttaaaacagagctaccattcgactcagcaatcctgttattgggtataaaactggaatacaaattggaatacaaggaatacaaattgttctaccataaagatacatgcacacatatgttcacgacagtactattcacaattaccaaagacatggaatcaacccagatgcccatgaatggtggactgaataaagaaaatgtagtaaagttgcaaagacaaaaaaaaattttatatcttcttaaacctacgtaaggtacattattgtttgccccttcctcctcttcttcctccttctcctccgcaatgctgtttattgagcataccatatgccaggtactgtgttaaatagtttacatacattatcttgggaagaaaaaaaaaggctatcttgcaaaagtctaaaaagttgttttaagaagagaagggggaatcagatggaaagaagagtgaattgagatattctgagaatttagagaagaaaaaaattatgagagcagcaaaacagtgaactagtgttttgttgtattgtggcaggaggaagaggtgtgatttgagcccacgttgtcctctgctatgattcaggtataagtgatcatgaggagaaaactggtggggaaaaggaggatgctaggaaataatccatcctgaagaaagcagaatccaggcatggatgtttgattcaggaatcacggaaccattgtcaaaagtggataagtagagttttgaggaaaccagaatatatgtcactcagcttattgtctaattcatatttgacctgaagatggaggcagttctaagaaagaagatccatggatcattatgatgtcatgcacaacctttttccagccacacttgaaacaaatctactcctgggcttttccattatgtgagccaatagactgttttcttcttgctctctctctccttctctccttcaactccctttgtattccccaagttggttttgctcctcaattcaagctttccattccataaaaaaataattcctaattgataaattatagaatggaaaagtgttgaccttgctgagtccaaaggcacaatcaatattttcagcccaccctctttctctctcaggttttgttcttggctcagattttcttttcatgttgatctctgtctcctattataggaagattcctctgtgcagctgggaaaaatgaccacagatggctccagtgtatgttgtctgcagcatcttttctgttacctccagcaaaaacatccttgaggaggatgcagattgggctcatttgggtcacaagttcatccctaaagccatcaccatggccagagatttttgactttattaaaaagaccaagtatttttctcttctgctccctcccccaaatcctaggagaatagagttaacccaaaattaaataaatagaatgggggaaaggtggtataatagatattgttgtttccccacccttacctggccaaggcatccatcccccagatgctgtgttgactgttaacaacctacagttgctctctttgtaagacttgtccttgaccaaataagaaccccttcccctaattctatctttatttaaaactttattgtgttcatcatgaatttttaaattcatttttatttaatatattgcattaaaatcgtattaatcttgattgttgagtttttttactttctttcaaattttaccctgctcacttcaccctagtcctggccctggctaagaagctatactccagccctccatcacccctctagggacagacctcagccaatgattaactgatgtaggggtacaaaaggtcacccccttgcctcaaggtagggataactctgtagtagaatttgtgttccagagttgccccaggatcaggcactaaagctagtcaccagctaagaccacattcttgctttcatccttaccctgtcctgccttcctcactctcttttcttgagagtgttccacacatatcacttggataagattacctgccttaggttctgcttctagggaagcctacctaagaaagttgataccaggaagggtcctaggaagcagacagtaagtggaggattttgtcgttggattactcaccagctggataacagtaggaccaggtgctgatactgcctggatgctgcatgccacacaccaaaaagcatttttgtggcaacagaaaaggactaagacactgtgaaagtggatttttaaggcttttacctgtagtgagctgtaacgggatacaggtgcaaggggattcgctaactggtacaatatcctaggctagtggtttcagtgatctgcacattaaagtcacctgggaaacttaaaaattcctaggcccagaccacacctaagactaattacattacaatctctgggtttaggacactggcaccggtatttttagacactcccagtttattcctatgtgctgacaagtttagaaactactgcctcaggcagttggggcttgtagggtaatagtacctgcaagaaaggattgtggaattggatagctattgttaattattattgattcatggcagaaagaaaaatctcaggctcagatctattaatcaacaactttaaggccaggtgcagtggctcacgcctgtaattccagcgctttgggaggccgaggagggtgaatcatttgaggtcaggaggtcaagaccagcttggccaacatggtgagaccgaatctctactaaaaacacaaaaaattaacctgttgtggtggcaggtgcctgtaatcccagctattcaggaggctgaggtaggagaatcgcttgaacctgggaggtagaggttgcattgagctgagatcgtgccactgcactccagcctaggccacagagtgagtctcaaaaaaaaaaaagtttgttcatgtccttcgtccactttttgatggggttgtttgtttttttcttgtaaatttgtttgagttcattgtagattctcgatattagccatttgtcagatgagtaggttgtgaaaattttctcccattttgtaggttgcctgttcactctgatggtagtttcttttgctgtgcaaaagctctttagtttaattagatcccatttgtcagttttggcttttgttgccattgcttttggtgttttacacatgaagtccttgcccttgcctatgtcctgaatggtaatgtctaggttttcttctaaggtttttatggttttaggtctaacgtttaagtctttaatccatctcgaattgatttttgtataaggtgtaaggaagggatccagtttcagctttctacatatggctagccagttttcccagcaccatttattaaacagggaatcctttccccattgcttgtttttgtcaggtttgtcaaagatcagatagttgtagatatgcagcgttatttctgagggctctgttctgttccatttatctatatctctgttttggtaccagtaccatgctgttttggttactgtagccttgtagtatagtttgaagtctcaaaagaagacatttatgcagccaaaaacacatgaaaaaatgctcaccatcactggccatcagacaaatgcaaatcaaaaccacaatgagataccatctcacatcagttagaatggcaatcattaaaaagtcaggaaacaacaggtgctggagaggatgtggagaaataggaacacttttacactgttggtgggactgtaaactagttcaaccattgtggaagtcagtgtggcgattcctcagggatctagaactagaaataccatttgacccagccatcccattactgggtatatacccaaaggactataaatcatgctgctataaagacacatgcacacgtatgtttattgtggcattattcacaatagcaaagacttggaaccaacccaaatgtccaacaatgatagactggattaagaaaatgtggcacatatacaccatggaatactatgcagccataaaaaatgatgagttcatgtcctttgtagggacatggatgaaattggaaatcatcattctcagtagactatcgcaagaacgaaaaaccaaacaccgcatattctcactcataggtgggaattgaacaatgagaacacatggacacaggaaggggaacatcacactctggggactgttgtggggtggggggaggggggagggatagcattgggagatatatctaatgctagatgacgagttagtgggtgcagcgcaccagcatggcacatgtatacatatgtaactaacctgcacattgtgcacatgtaccctaaaacttaaagtataataattaaaaaaaaagtttaagcaaactgtgagagtcaaagtatctccttggaagcatttaaagacactcatttcctgcagcaggagagctgcacaactgaagatcaggttgaggattttagtaagaatttttagttgcctaaacccctcggtctgcagaagtgaccaactctcccttgttagatagagaccttctatttcttgaaggctattaagaggtatcaaacaaggcaatgctttgcaaataaagttgccagataaaatgcaagatgcccagttaaattttaatttcagataaactgtgaataattattaaattttcatgaattattacagtatcataatctcctgtatcctgtttttttattgctaaatctggcatccctatttataaggtaatacttaccctactcaggatctgccctaacctttcatctggcctccagaaacatttttaagaatggagggtgggaagagggtgagaatcaaaaaactatctatcgggttctatgtgcattaatagaaatgatgcacatagttgcatcatttctattaatgatgcaaaaagtgatgaaataatctgtatgccaaatccccaagacatgcaatttacccatataacaaacctgcacatgtacccccaaacctaaaataaaagttagaaagggaaaaaaaaatcagcaaaacctgattgaggaagtatgaggcttgctaagggaagagagagaaaatatgccaaaggagctgtaggacctggtaggaggggaataaggtttattgaaaatccagtaatatctgttatctctaggcaggaatgacagtatcaaattctatgtcagaagtgggctttacagtatcaatgggataagtgtattagtttgttttgtactgaatacctgatagaatacctgagactgggaaattcataaaaattagagatttatctcttccagttctggaggctgggaagtcccaggctgaggtgccctcatctggcaagggacttcttgctgtgtcatcccatggtggaaggtggaaaggcaagagagcacacaagcacacaggcacaaacatgcatgagacagagagagagagaagggggcaaatctgcttttatgaagaactcactctcacaataatgaacccactcctgcaatcatgacataatccatttatgagggcagagccctcataacttaatcacctcttaaagttcaggtcccacctctcaacactgttgcattgataattaagtttctaacacataaactttggaggacatattcaaaccataccacctgtttattagttattattatgtttattataattgcagatacatttctgcttaaatctatcattttattttatgctttttatttgtctcacctgttccatgtgtgttttctctttttttattgcctttttttagattgttttaaaacatactagtttttttcctccactaggtgtgaaattaaacattctctttccattatttgaaaggcttctatagaaattaccacatacaagcttaacttatggaagtctacaattaatcactatctcttattgaacaaggtccacagaacattttaatatcatttaaactccttccaacttacatattattttttcatgtatttaaatatcttttcttctgctaacaataacaacatcattattccttgatttgattcatttcccttaaatttacccacatatttactcttcactgcactttattcctttttacattacagcctttctctgtaggattattttctgcctatatacggagtatacacgttagaaattcttttagggagggtctgctgttggaaaaatctcttagtttgtatttaccctattcatgacaggtgtaaaattgtatgttggcaattattttctcagtgcattgaaggttattattccactgtcttttagcactcctcattatgaagaagccaactgacaagttgttacttctttgaaagcaatctgtcttttttctttttctttttctttttattattattattatacttttagttttagggtacatgtgcacaacgtgcaggtttgttacatacgtatacatgtgccatgttggtgtgctgcacccattaactcgtcatttagcattaggtatatctcctcatgctatccctccctctcccccctccccccaccccacaacaggccccagtgtgtgatgttccccttcctgtgtccatgtgttctcattgttcaattcccacctatgagtgagaacatgcggtgtttggttttttgtccttgccatagtttgctgagaatgatggtttccagcttcatctatgtccctacaaaggacatgaactcaccattttttatggctgcatagtattccatggtgtatatgtgccacattttcttaatccagtctatctttgttggacatttgggttggttccaagtctttgctattgtgaatagtgccacaataaacatacgtgtgcatgtgtctttatagcagcatgatttataatccttcgggtatatacccagtaatgggatggctgggtcaaatggtatttctagttctaaatccctgaggaattgccacactgacttccacaatggttgaactagtttacagtcccaccaacagtgtaaaagtgttcctatttctccccatcctctccagcacctgttgtttcctgactttttaatgattgccattctaattggtgtgagatggtatctcattgtggttttgatttgcatttctctgatggccagtgatgatgagcattttttcatgtgtcttttggctgcataaatgtcttcttttgagaagtgtctgctcatatccttcacccacgttttgatggggttgtttgtttttttcttgtaaatttgtttgaattcattgtagattctggatattagccctttgtcagatgagcaggttgcaaaaattttctcccattctgtaggttgcctgttcactctgatggtagtttctttcactgtgcagaagctctttagtttaattagatcccatttgtcaattttggcttttgttgccattgcttttggtgttttagacatgaagtccttgcccatgcctatgtcctgaatggtattgcctaggttttcttctagggttttcatggttttaggtctaacatgtaagtctttaatccatcttgaattaatttttgtataaggtgtaaggaagggatccagtttcagctttctacatatggctagtcagttttcccagcaccatttattaaatagggaatcctttccccatttcttgtttttgtcaggtttgtcaaagctcagatagttgtagatatgcggcattatttctgagggctctgttctgttccattggtctatacctctgttttggtaccagcaccatgctgttttggttactgtagccttgtagtatagtttgaagtcaggtagtgtgatgcctccagctttgttcttttggcttaggattgacttggcaatgtgggctcctttttggttccatatgaactttaaagtagttttttccaattctttgaagaaagtcattggtagcttgatggggatagcattgaatctataaattaccttgggcagtatggccattttcacaatattgcttcttcctacccatgagcatggaatgttcttccatttgtttgtttgtttgtatcctcttttatttcattgagcagtggtttgtagttcttgaagaggtcctacacatcccttgcaagttggattgctaggtattttattctctttgaagcaatagtgaatggaagttcactcttgatttggctctctgtttgtctgttattggtgtataagaatgcttgtgatttttgcacattgattttgtatcctgagagtttgctgaagttgcttatcagcttgaggagattttgggctgagacgatggggttttctagatatacaatcatgtcatctgcaaacagggactatttgacttcctcttttcctaaatgaataccctttatttccttctcctgcctgattgccctggccagaatttccaacactatgttgaataggagtggtgagagagggcatccctgtcttgtgccagttttcaaagggaatgcttccagtttttgtccattccgtatgatattggctgtgggtttgtcatagatagctcttattattttgagatacatcccatcaatacctaatttattgagagtttttagcttgaagagttgttgaattttgtcaaaggccttttctgcatctattgagataatcatgtggtttttgtctttggttctgtttatatgctggattacatttattgattttcgtatgttgatccagccttgcatgccagggatgaagcccacgtgatcatggtggataagctttttgatgtgttgctggattcggtttgccagtattttattgaggatttttgcatcaatgttcatcaaggatattggtctaaaattctctttttttgttgtgtctctgccaggctttggtatcaggatgatgctggcctcataaaatgagttagggaggattccctctttttctattgattggaatagtttcagaaggaatggtaccagctcctccttgtacctctggtagaattcggctgtgaatccatctgttcctggactttttttggttggtaagctattaattattgcctcaatttcagagcccgttattggtctattcagagattcaacttcttcctggtttagtcttgggagagtgtatgtgtccaggaatttatccatttcttctagattttctagtttatttgcgtagaggtgtttatgatattctctgatggtagtttgtatttctgtgggattggtggtgatatcccctttgtcattttttattgcatctatttgattcttctctcttttcttctttattagtcttgctagtggtctatcaattttgttgatcttttcaaaaaaaaacagctcctggattcgttgattttttgaagggttttttgtgcctctatttccttcagttatgctctgatcttagttatttcttgccttctgctagctttttaatgagtttgctcttgcttctctagttcttttaattgtgatgttagggtgtcaattttagatctttcctgctttctcttgtgggcatttagtgctataaatttccctctacacactgctttaaatgtgtcccagagattctggtatgttgtgtctttgttctcgttggtttcaaagaacatctttatttctgccttcatttcattatgtacccggtagtcattcaggagcaggttgttcagtttccattagttgaatggttttgagtgagtttcttaatcctgagttctagtttgattgcactatggtctgagagacagtttgttataatttctgttcttttacatttgctgaggagtgctttatttccaactatgtgatcaattttggaataggtgtggtgtggtgctgagaagaatgtatattctgttgatttggggtggagagttctgtagatgtctattaggtccgcttggtgcagagctgagtttaattcctgaatatccttgttaactttctgtctcgttgatctgtctaatgttgacagtggggtgttaaagtctcccactattattgtgtgggagtctaagtctctttgtacgtcactaaggacttgctttatgaatctgggtgctcctgtattgggtgcatatatatttaggatagttagttcttcttgttgaattgatccctttagcattatgtaatggccttcttcgtctcttttgatctttgttggtttaaagtctgttttatcagagactaggattgcaacccctgcctttttttgttttccatttgcttggtagatcttcctccatccctttattttgagcctatgtgtgtctctgcacatgagatgggtttcctaaatacagcacactgatgggtcttgactctttatacaatttgccagtctgtgtcttttaattggagcacttagcccatttacatttaaggttagtattgttatgtgtgaatttgatcctgtcattatgatgttagctggttattttgctcgttagttgatgcagtttcttcctagccttaatggtctttacaatttggcgtatttttgcagtggctggtaccagttgttcctttccatgtttaatgcttccctcaggagctcttttagggcaggcctggtggtgacaaaatctctcagcatttgattgtctgtaaaggattttatttctccttcacttatgaagcctagtttggctggatatgaaattctgggttgaaaattcttttctttaagaatgttgaatattggcccccactctcttctggcttgtagagtttctgccaagagatcagctgttagtctgatgggcttccctttgtgggtaacccgacctttctctttggctgcccttaacattttttccttcatttcaactttggtgaatctgacattatgtgtcttggagttgctcttctcgaggagtatctttgtggcgttctctgtatttcctgaatttgaatgttggcctgctttgctagattggggacgttctcctggataatatcttgcagagtgttttccaacttggttccattctccccgtcactttcaggtacaccaattagacgtagatttggtcttttcacatagtcccatatttcttggaggctttgtttgtttctttttattcttttttctctaaacttctcttcacacttcatttcattcatttcatcttccatcgctgataccctttcttccagttgatcgcatcggttactgaggcttgtgcattcgtcacgtagttctcgtgccgtggttttcagctccatcaggtcctttaaggacttctgtgcattaattattctagttatccattcgtctaatttttttttcaaagtttttaacttctttgacattggttcgaacttcctccttcagcttggagtagtttgatcttctgaagccttcctctctcagctcgtcaaagtcattctctgtccagctttgttccattgctggtgaggagctgcattcctttggaggaggagaggtgctctgatttttagtttccggtttttctgctctgtttttttccccgtctttgtgattgtatctacttgtggtctttgatgatggtgacatagggatgggttttttggtgtggatgtcctttctgtttgctggttttccttctcacagtcaggactctcagctgcaggtctgttggagtttactggaggtccactccagaccctgtttgcctgggtatcagcagcgatggctgcagaacagtggatattggtgaaccgcaaatgctgctgcctgatcgttcctctggaagttttgtctcagaggagtacccggccatgtggggtgtcagtccgcccctactggggggtgcctcccagttaggctactcgggggtcagggacccagttgaggaggcagtctgcccgttctcagatctcaagctgcatgctgggagaaccactactctcttcaaagctgtcagacagggacatttaagtctgcagaggttactgcggtctttttgtttgtctgtgccctgccccagaggtggagcctacagaggcaggcaggcctccttgagctgtggtgggctccacctagttcaagcttcctggccactttgtttacctactcaagactaagcaatggtgggcacccctcccccagcctcgctgccaccttgcagtttgatctcagactgctgagctagcaatgagcaaggctccgtgggtgtaggaccctccgagccaggtgcgggatataatctcctggtgtgccgtttgttaagcccattggaaaagcccagtattagggtgggagtgacccaattttccaggtgcagtctgtcacccctttctttgactaggaaagggaattccctgaccccttgcacttcccgggacaggcaatgcctcaccctgcttcggctcatgcacgatgcactgcacccactgtccggcactccccagtgagatgaacccgttacctcagttggaaatgcagaaatcacccgtcttctgcattgctcacgctgggagctgtagactggagctgttcctattcggccatcttggctccaccctctgtttttttttttatgagatggagtctcgctctgtcacccaggctggagtgcagtggtgcaatcttggctcactgcagcctctgcctccccgtttcaagcaactctcctgcctcagcctctcaagtagctgggactacaggcatgcgctgccacgcccagctaatttttgtatttttagtagagatggggtttcaccatgttggccaggatgatcttgatctcttgacttcgtgttctgcctgtctcagcctcccaacatgttgggattacaggtgtgagccaccacgcctggcctctggcttcttttaaaatcttctctttgtctttgaaattctaaagttacatgataatgtgtgtagatatggatttctttttatttatgttgtttgggctttattaagcttcttgagtcagtgttttagtgtctcttcttcatttccatttatgtcagccattcaatctttttggaggctgccattcaatccactacacttatcgttgttcttctccagtgattggcctccttaaaaaaaaaaacaaaaaaacaaaaaaaaaacttgtattgaggaagaggaacatctactggatttgagctatttccaacagaaaccaagacccataactagtatatgtggatgaacacaaaattgtgagatctttgaaaagttatcaaatcagttcctattcacattggtgttttttgtggttgtgtgtttgttttgtctaacagcaatgtgctaattttttagattatttttatggttccaataaaagagaggttttattttattcattttatccttctgtttaattttaaaaacacaaaaacagttaaagcagtttctaaaaatgcacttttaaaatagtctacagaatagtttactataggtgatgaaactagaataaaaggaaaatcaaggcaggcaaaataagttttaaatcaaaagtaaaaataattcacaaaatgcatgcaaatgtgaattaatttgggtgccagaagaaggctacaatttgaatctgtgcttcatagctggtaaggcaaagttaagaacacaatcaggtaaaatattcataaaccaactgctctggggaagcaaattctggttttgttactgagacaggaaaacaattttcccaagattttaaaaggggatgatcatgaagtgtatcagatagtgtctttaataacaacccagtattagatacaatcataaattccatgacctcactaccgaacaatgacaaaaactgaagcaactttacataggcaaaaacaatgtgatccaggataagtgctctgataatcaaactagagctaagaataaaatacaaaccatctgaagaatagatggcttgtatgtcttctatgcaatgttctgtgactgttgtctctcaaaattaaattttcaataagcattggctgatgaagaactcaaagttctattttctcacaagaacctggaatgtattttgatgttcaaccaaacaaaggaagtaatgttgccatcttcctaaaaagatgagaactctgatcaaaacccctgctttaatgtaaggatatcccccttccaaatggacacaggacaatgaaatgcttatggcagataagtatatttttaagtatttaataccataagtaatgcatataattttttttaaagctgaaacattatagagaagtgaaaagtctcctttgactaccatcttcattcctagtcctctttccctctgcagacgtgatcacagttagcaatttggtacattctttcattacttctttgcatttgcatatgtatgtatagaaaatatctaatataaagtattattttgtacaaattgctctttatataaaaatttcagtatttctattagtcacttttcccccactcaacagtgtacattggatttctaatcatgtcagtacctataaatccacttcattctatttccttctttcacaggtgaacctgtaggttgtttactaatacaaatattgttaatgactacctttgcatctgcctcattggcacaggagcgtttcttgactattagcttttgagaagtggaattgctagatggaacttttaattttttaataggtactgccaaattacttcttaaagtgattgcaccaatttacacttcttcaagtagtgtatgacagtacctgtctccttaggccctcagtaacactgaacattaacaatcttttaaaaatttttattccaaaaaaatgaaaatggtatctcattgtttgaatttgcaattccctgattattactaaagacgcactttttttttccattttcagtgatcactaatgttacctctcccactcagttttcaaataaatttatttttattttattattttattttaaaatctgagacaaagtcatgctctgtcacccaggctggagtgcagtggcataatcatagctcactgcagccttgaattcctaagctcaagggatcttccttccttagcctgccttatagctgatttcattatgcttggctaattttttaattttttatagagacggggtcctgctatgtttctcaggctagtctcaaactcctggcctcaagtgatcctcctgccttggcctcccaaagtgctggaattacaggtgtgctgtcaacatgcctggcctctcaaccatttttttagtaagttgtttgtctcttacttactgacttgtaagaattgttttattaagaattattttatacatatatataatacaagtcatttacctattatacacattgtaatcgtttacttccaatgtgttgtgtcttttgtttatggcacaatgtaaaataccaacatttttcattttggtatagtcaaattcattgatcttttcctttacttcattttagtatcttatattgaaaatacaagattctctactaaatataaatttattgcgcagaaatcagaagccacttgtgacttcctttgcctataaatcccttactgattctctcttcccacctgatccacatgatctttactatccaccctacaacatttagcacatcttctgtgagaggcagtccttgggacttcacagggtagaatggttgccattcattcatttatttattcaattaataatctttagttatcatatgccaggcacagtgctaggccttggttatacagctgtgaataaagcagacaagatttttgccctcattgagctcacagtctaatgaaaacaacatacatttaacaaatcattaaacatgtatactcatcacatactgtcaagtatgaagaaagaaaagcatagggtgctatgagagagtgggtgttggaacttccactgtgctgagctgatctccatgacagcttgcatcatactgtattctaattttccgatccctgtggctttcataccatgggccccacacattgtttgtctgacaccagtttccccagagccatcttccctgacagggccagactccaggtttgactatgcctgcctctctcttgctgctctgctgacttagcatagcatgagtcactcttgctctgagaaacaaagttctgagaaaactgagccaacaaacaggtgacagaaaaataaaactcctagcgtaagggatttggagcacgtaggggtggaaaaatcactctggagttgtcagatgaacctgatccagataaatactctgggcttggatgaacaatcagatagcaaactaaataaaagtgcattttgagtactgtttgaaacagtgatgtgtaaataccttctataccttgagaaaggccctcatagtaacaatggagatgttgtcacagaaccaaactataatatttggactatgaaaaaaacagaagatagaacattggagccaatgaatccacattttccctgtcactgccatctggaaaatcagccattataccctcagggtttcaagatcttagaagaaaccctgaaaaggcaggaacgggcctcccactgtcttccttgcacttgaggcctggcatctacagccaactctctgctccaccagctgtataatgttaggcaggtggtttacctcattgtctctgcctcagttttctcacgtgtaaaatgtgaataaataatgggcctcctagagtctttttgagtgcttaatacatgatgggcattataattttataatgtataattttttcagcactgagcctgtcaatatgttctgcaaattgccacctcagacttggaggcattccaagacagccaagctcagctaaggcctccaggaatggaaaggaaataagttcctccatttacctagcccaagttccttgctggacctattgaccttccaccttcctaggtagagagcaatttggatattctttgtttaaataaataaataagtactaagtaatacttatgagtattttcttagacatgttcagcaaaaaggaaaactcatgctggctgtagaggcttcactaccaactgctcagcacacaagtttgcatggcattagctttccctagcaggccaccaacctggcaccaggccccacactcaaatctggagctctctttcctgaccagagctctatcccatgctctgatggtctgagtcagctcacatgttttgcctctcccaattgagctgcagaaattctctcttctattctgttacctgcttcacctccccagccacaatatgccaaatcatgaactgtccgatgatggggtggtgcctgcctgcagggccactacctctggctgtctccctgagtgtttactgctaatttaagctctgcaggggaactctgttcacagggacatggcccctggggtgaaagaggtctcactctgactcgcactcagtcccaaaccaggctgtgacaaggaataaacagggattctcagggaagaagagagacattcttcaggcttttctacctgaaagggtaagcttcatcctagaaaaggctagaaaatgtgatggactcaatcaacagatcttctaaaatccaaggacatttgctttctaccacaaagaaaaatgagggtggaatttttcttctcaaatgtgcctaagccactatttggaaaggaagtttgatatttgcaactacggttttctcaataatcagttagcaacaattttaaaaatcaagaattgagacagaaataaacagtcagaaatgagcttggtacatcacagttgaagtcaacactgtgacagtaaaatagttaatcctgggttcacagctgtgggataattcagaaaaaaaaaatgttttttctatttttctatttgctgagtgctaaagactaggttctctctctaatcccaggccactttatcctaataaataaggaagttgtgcttattaacaggagcttaataagattgcagcccctttaaatatcctgaagacactggcggctctcctctccagcagcaaactgtggtgggcatcttaaggtcatttcctgtcctgtccttgaccactggctgcagcctgtggacatggctgaccagggcacagggccacaagactcatctttcttccagcacgtggatatgagggcagcatcatttcgcagaaaagcaaatacaattttgttttattttgtctaatatggttctggcacaacacaagctgtccctattctaaggctggagaatttgatttcctctctggcctgtggaaatgggctcagcatatagccctatttaatcacagaatgttaacactaatctgactaagatggctgacttgaggtgctccccaggctgcagcaaacagtgctaatccttctagctgaacctgggcccaacttcagagaacagagcggttggctgtttaatcactcatgaaggcatgactgattgaaaccatcatatacttccccagctcaaaatgcatatgatttttttcactgggaggaaaaaacacattactattttgacagttggcaccagaatcccactgaggggagagaacagtgagttctagcaacagtaatgtacattcattctgatactcctttcagtgccattttcaaccctccactccattatctctaaatgctcagtaaaagtctagtatcctagtatcctgaagccttggggaatgaaggcaaagatggtgtgagagaggagagcccctgcagatgctggaagaaatggtagaagccaagaaacagcaaagaaacaggtggcagtgtgggcaaactcggaaatgcagacacaggagaaagcttgctgacaggggcagggaatggggaaacagccaaaaggggtagactgccttggttctgatatatgaaaagggctttccaagtggtagacatttgaattcaatgaatattttgcccaagacatctgcaatgataactcatatgtaatctaatacactgacattttgcaaaatataatctcagaagcactttctatgtgaataatattgtaaacatcattttcagtggtgtcataatagtctattgagcagatttgccatggtttatttaatgtttccctattttggacttttaaataaattcaaatgtttagctattaaggataatggtgttatgaacatctttagacagaaagcttttaccacagttaggataacttcctcatgatgaattcccagcaatgaagttcactgggttagatagcatgaaatttttgaacttttgataaatagtgataaagtggttttcatttccatcaatactgataaggatcctagtttctctgcacctgggaatctcagtttctctgcacaagggaaactattaaataccacttattctctggagggagatgttcttaagattaacatgtatttttagaggctacattcttaaaggtaaaattactaagtcaaaaagtatgcatatttgaacttttggtagataatgtcaaattaccatctaaataggctatatcatttaaacttctatcaaccacgtatgaaaatactcattcctccacactatctccaaccatgagttgtatcaaacttaaaataacattttttagtcaatctgatatcaaaaatatctcattattttaatatgcatttccacaatgcctagagaggctaaatgtcttttcatattattagctacctgtgtttttttatctgtgaattgcttgttcatatatcttgctcattattcttagtttgttcctattttacttactgatttgtagaagtggtctattgccagccaggcgcggtggctcacacctgtaatcccagcactttgggaggtcgaggcgggtggaccacctgaggtcaggagttcaagaccagcctggccaacatggtgaaaccccgtctgtactaaaaatacaaaaaaacagtagccagccatcgtggctggtgcctgtaatcccagctactcagtaggctgaggcagaagaatcgcttgaccccaggaggcagaggttgcggtgagccgagatcacgccattgcactccagcctcggtgccaagagcgaaattccatctcaaaaaaaaaaaaaaaaaagaaaaagaaaaagaaaagaagtggtctcttaccgaaatatattgcctattatgtacattgcaaatatttcccgcattttctttgtttattctagtgccttttattggacagaaaattttaatttgtatatatttagatacatctgtttttcccattttacacctgtttttaatctagtttaggagggttttaaccatcccaaggttataaaaatattctccaatgttttgttctaatagtcttgttttttgtatttatttaatttatatggaatttagctttgcatatgttgtgaggtatgattttgtcccaaaactttagcaattgttcatttatcatgaaataattatagtcttcttggatccagttttctactctctagtcattaacttcataataggttttgttctggtgaagcaagctactcttatttttcttgtttcaaaattttattggttattcttgtccatttattgttccagatgaactttagaatcattttgaaggggatcatttttcaaagttattaattttcattgagattacactgaatttacctattaatttgtgaacacattatgcttttgtaactttataatactaaatctttctatgaagaaaatcacattactctccatttattgatttattggactacttttctgtttcttctatttttattgatatcttcaaatttttcaccttatcttgattaaatttttaataatagctttattaggatacaattcacataccataaagttcgcttttaaaaaaatgtataattcaatggtatttagtatattcacagggatgtgcattgatcactgctatctaattccagaagattttaatcactccaaagggaaaccacgtatctattagcaatcattccccatttcctccttgccctagcctctggcaactactaatctatttcctgtctctatgaatttgcctatcctggagatttcatataaatgaagtcatactgctatgcatgattcatacatgtggccatttatgtctggcttctttcacttaacataattatttcaatgtttatctatgctgtagaatattactaaaacttaacttacttttatggcaaaataatatttcattttatgactgtcacattttgtttatccattcttcagttgatggacattgggttgtttctgcttttaggttattatgaataatactgctatgaatatttgtgtacaagtttttcttagccatgtttttaattctgttgggtatatatgtaggacatagatatacatacttaaatctattcctatatatacctggaagtaatgggtcgtatgataactctataacattttgaggaactgctaaattttccaaacttgcaaagtgggtatactatttcatattcccgccaacaatttatgaggatcccaatttctccacaccttcactaagacttcttgttttaattacagccatctcagtgactatgaagttatttctcattgtagttttaatttttatttcccaaatgactaatgatgttgagcatcttttcaggtgcctgttgactatttacttctgttttcttctgagagctttgtagttctagctcttatatttatgtctataacctacatttatttatttttgtatatggaatgaggtggggggtctatcttttttttttttttttgtatatggccatcctgttttcccagtatcatgcattgaaaagatgattcttcccctgccccttgagtggtcttggtacccatgtcaaaaatcagttgatcatagatgcataggtttatttatgaactctccattctacttcattgatctatgtatctgtccttatgccagtactacataatcttgatgactatatctttgtagtaagttttgaaatcaagaagtgtgagttctcaaatttgttctttttttttcaatattgttttgactattctgagtgccttgcaacttcataagaattttctaatcagttcttcaatttctaaatgaactcagctgggtttctgatagggattgaattgaatctgcagatcaatttgggaagtgttgccatattaacaatattaactcttctgattcatgagcaggaattgtctttttacttatttcaggtttctttaatttctttcatgtatgttttgtcatttttagaatacaagtcttgcacttgttttgttcaatttattgctaagtaattcactttttgatactatcgtaaatcaaaatttaacttcattttcagattgatttttgtgtacataagtcacttggtttttgtatattgattgtgtattctgcaaccttgataaactcatttatttgttctaatttttttgtatttattagaattttgtatacataagatcatgccatggagattgttttatttttttctttccaattggaattctttttatttcttttcttgcctaactgcccttgctacaacctccagaataatgttgaataggagtggttagtgcaaaaggaaggggctcaagatggctgactagatgcatctgttacttacctcttccatggagaaaaaccaaaatggtgagtggataatcacactttgaatactttgtttaggagaaagcactggaattcaacagagaattgatgggaagcaccaaatccaaggaagaagaggaaagtgcagcggcctactcagccaggatcaactggaagcctggagaggctccctaatgccgtgaagggtcagtaagagaccctagtggcccaaactcccaccgtggactccaacaagtctaaccacaagagagcacctcaacccatacaggacctgagactaacacagggagctgtctggagactgcaatggcattactccagagagggagctcatgctgaggcctacaaacccctgagtactaagcagctgtagcatggcatcatttttggagcccaatatctattagaatgcttcctgccctggggaccaacagcccttgcatctccacatctttggagcccagttgacattttctatctgtagccactactgccagggttgagtcaggagccattggcagcaaccccacacccccaggaaaggagtggccaagcatcttcacatgccccaaggacaaattccacaatccacaatttctgcagctgcaggctgctgtgaggctgaagtgtaagtaaagtgtgtgccccccggctggctgcctatagctgttctcactgaaagcaatcctgtactccctagtagcagggctgcagtatagctactgctgccacaacctaaccattccactggtgcctaggagatcaccctgccacagcatagcagagcaagctcctgcatgcaccagtaggaggcctcaggacaggtctgcccagcccagcttcatcccctaaatactcaagcatgccattcaggtgcctgggaattgcccagccctgtccactaccattggtacttgagcattcctcccaggttctgaagtcaggcctaccctaactgctatgacaaccacagctggcacccacccccatgtgccacctgcaggcctggggactggcccacttagccagtcacaccttaacatggaccaagaacacttgggtcccagagggttgtcccaccattgctactgccataacccacacttcctgctgcccaggggccccaagaacctacctaaccacccaaactactgctgccactcctggcacccaagcaaggcacctggaggtccaagaatcaacccatctggacttaccaacactagcgtgagtacatgctgctctggtgcccaaagacaggcatgctcagactgctgctgccaacaatggggctaaaggactggccatggcattccagtccccagcaaaacttcatcacaacctccactaagaaccacaccctaagccaaagaggaaatcgtagataccactgaccttgtttacagctgaagaaatcacacagaggctagactaccacatgtacccacaatcaaagccaaagcaccctacccaaccaacactatagatacatctttagaaaaatgtccttcccagagcttgcagtgacccgagatcaggccactgcactccagcctgggtgacagagtgagactctgtctcaaacaagaaagaaaaatgcccttccctctgaaagcaaactcagaaaactggaagaagcaactgttacacaggaaggtatctggagactgttaccagatgtgcagatatcaatgtaagaatataagaaacacaaaaaagcaaggaaatatgaaacctccaaaggaatagcataattctccaacaactgatctcaatcaaaaagaaatttatgaatttatgaaatccccccccaaaattcaaaatattgattttaaagaaactcagtgacagacaagagaaaaaaatacaatggaatcagaaaaacaattcaggatatgaatggaaaatttaccaaagagatagatatagtaaaaaagaaccacatagaaattctggaaatgaagaatgtatataatgaaatacaaaatacatatgaaagcttcaacaatagatcaagcagaacaactagatcaagcagaagaaagaatcttagaaattgaaggtaggtcttttgaaataactcagtcagatgaaaataaaggaaaaagaataaaaaagaatgagcaaagcctatgtgacatatgggacaccataaagggaccaaatatttggattttttgtgtcctagaaagcaaagaaaaaaaaacaaaagaattagaaaagctatttaataaaataatagatgaaaactttgcaagtctagcaagagatttagatatccagatacaggaggctcagaggtcctcaaatagatacaattcaagaaggtcttctccacagcacattatagtcaaactgtcaaaaccaaagacaaaaagaagaattctaaaatcagcaagagaaaagcatctgggcatttataaaggaatcctcatcagagtaacagcagatttctcagcagaaatcctacagtccaggagagaatggaataatatatccaaagtactgaaagaaagagaaaaaaactgcgggcacgaatattatacccagcaaagttatccttcatgaataaagaaaaaataaagtcttttccaggcaagcaaaagctgagggaatgcatcactactagaccagacctacaagaaatgtttaagtgagacctacacccagaagtgaaagaatggtatctaccatcacaaaaacacacacaaaaataaaaaccactggtagagctaatacacaagcaaggaaagactcaaatgttaccaccacagaatactgccaaaccacaatgataaacaataaaagagaaaagaacaattagaaatcagttactaaaattatgggaataagccctcacatatataatataaaagatataggctggccaaatagataaaaaattatgacccaactatatgctgcctatgagaaactcatctcacctataaagacacagacaactgaaagtaaagggattgaaaaagattctatttcaagcaaataaaaaccaaagcaagcatcagtagctatactcatattagataaaataaactttaagtcaaagaccttaaaaagagacaaataaggtcattatataataatgggatcaattcagcaagatgatataactattctaaacatatatgtacccaataccagagcacctagatatataaagcaaatattattagctacaaagggagaaatagattccaatgcaataatataatagatcattagagaacattatgaacaactacacactaacaaactggaaaactagaatataaattaatacaaccactatggagaacagtttggaggcttatcaaaaaactaaaattagagctaccatacaatccccctctctcaccatgtgatatgctggctccccttcaccttctgccatggttgtaagtttcctgagaccctcattatgcttcatgtataatctgcagaaccatcagccaaataaacctcttttctttttaagttaccaaggctcaggtattttttttaatagcaatggaaatggactaccacgtgaggtgtgtttcttctatgtctagtttgttgagagtttttttgtttttgttttcgtttttgtttttgagacaaggtatcactcccattgcccaggctggagcatagtggcatgatcttgcaacctctgcctcccgggctcaagtgattctcctgcctcaatctcctgagtagctggaactacagatgcacaccacggtaccccgctaatttttgtgttttttgtagagacagggtttcactatgttgcccaggcaggtcttgaactcctgagttcaagtgatccacccaactcagcctccaaaagtgctgggattataggtgtgagccaccatgcctggcctagtgtttttatcatgaagagatattgagttttgtccagtgcttttttctgcatctatgaggtgatcatatgatttttgtccttcattctattgtgatatatcacatttaccaacttgcatatgttgaatgatcctcacattgctggaataaatcccacttgatcacagtgtattcttattatttttgataagctgttgctagtattttactgataatttttgcataatgttcatcagggatattggcctgtagttttctttctttcttgtatccttgtcttgttttagtatcagggtaatgttggcttcaaagaatgagttaggaataattctcatttcttcaattttttggaagagtttgattagaattggtgttaattctttgaatgtttggtaaaatttggcagtgaagccatatggtcctggacattcttttttgggaggctttttattactgatttgatttcgttactcgttgttctattcaggttttctatttcttcctgattcaatcttggtagcttgtatgtctccagaaatttatccactttgttagtgtatagttgttcaaggtgagctatgagtcgagtggaataagacaaaccatgagaatggagtttttttaatgtgttttgggaaataaaacagtaattattctctagagatgaaaatttggggaaatccaaagtccttctgtttcctccagtgatttctaaggctgctggttttcataatgaccataattgtatgactcttggctttcaaggtttacacagaactgggaaaaggaagttataatagaattaaagcaagttgaaatgccacaaggcctgcagtttctactgaggttcagccagttttcttgaataaatacttttctgattgttacaaacctctaatttccagagttctaaaagacttggttttgactgtttgtttgtttgtttgtttgtttgtttgtttgtttttgagatggagtttcattcttgtctcccaggctggagtgcaatggcacgatctcggctgactgcaacctctgcctcccaggttcaagcgattctcctgcctcagcctcccgagtagctgggattacaggtgcccaccaccatgcccagctaatttttgtatttttagaagagacagggttgcaccacgttggccaggcttgtctcaaactcctgacctcaggtgatccacctgcctcagccttccaaagtgctgggattacaggcgtgagccattgctcccacgcgacagttttttgccagcattcaaattgcttttttagaagagaagaattacttttattgcagaagtccttactgtgccattccagaagtcaagtttttcttttaagttgtgaactttttaaaatttttattttttgtagtaacataaaaggtgcaatatttatggggtacatgagatactttgatacaggcatacaatgcataatcacatcagagtaaatggagtatccatcacctcaacatttattctttgtgttacaaacaatccaattatttacttttagctattttgaaatgtacaattaaattattattgactgtagtcaccctgtcaccttgttctcctatcaaatactagatcttgttcattctcactgtttttagtcaccattaacaattcccatttccccacaatgcacccccactacccttcccagtatctggtaaccatccttctactctctatctccatgatttcagttgttttaattcttagtttcataattgtcaaaagatgtgaaatgtgtctttctgtgcctggcttatttcacatagcataatgacctccagttccatccacgctgtggcaaatgacagactttcattcatttttatcactaaacaatactctgttgtgtatatgtacacattttctttatccattcatctgctaatggacccttagtttgtctccaaatcttggctattgtgaatagtgctgaaataaacatgggagtgcagatatttctttgatatactgatttcctttcttcggtatatatacctagcagtaggattactggatcacatggtagctctaattttagttttttgatgagcctccgaactgttctccaaagtggttgtactaatttacattctcatcaaatctatacaagggtcactttttctgcacattctcacctgcatatgttattggttgtcttttggataaaagtcattttaatgagggtgagatgatatctcactgtagttttgattgcatttctctgataatcagtggtgttgagcaccttttcatatacctgttttccatttgcatgacttcttttgagaaaggtctattcagattttttttccccatattttaaccaaattttagatttttcttatagagttattggagttctttttttttttttttttttttttttttttttgagacagagtctcgctctgtcacccaggctggagtgcagtggcatgatcttggctcactgcagcctctgcctcctgggttgaagtgattctcatgcctcagcctccctagtagctgggattacaggcacacaccaccatgcccggctaatttttgtatttttagtagagacagggtttcaccacgttggccaggctggtttcaaactccttacctcaagtaatccacccaccttggcctcccaaagtgctgggattacaggtgtgagccactacgcctggccaaggttgttggagttctttatatattctgcttattagtccctagtcagatgagtattttgcagatattttctcccattcagtgggttgtctcctcactttattgatgcatcctttcctgtacagaagctttttaatttgatgtgatcccatttatctatttttgttttggttgcctatgcttgtggggcatatgctcaagaaatctttttccaatccaatgtcctggagaggttcctcaatgttgttgtttagtagtttcatagtttgagatcctagatttaagtctttaatccattttgatttgattttttacatcgtgagagatagggatctagtttcattcttctgcgtatggatatccagttttcccagcaccacttattgaagagactgccctttccccaaagtatgttcttagcacctttgtggaaaatgaattcactatgggtgtacggatttgtttctgggttctttattctattccgttggtctatgtgtccgtttttttttttttttccagtatcatgctgttttggttactatagttctgtagtataatttgaagccaggtaatgtaattcctccagttttgttctttttgctcagggtagctttggctattctgagtcttttgtggttccatataaattttagtggtttttttctatttctgtgaagaatgtcattggaattttgataggaattgcattgaatctgtagactgctttgggaagtataaacattttaacaatattgattctcccaatccatgaacatagagtatctttctattttttgtgtgtcctcttcaatttctttcatcagtgttttatagttttcagtgtacagatcttatacttctttggctaattccaaggtattttatttaatttgtagctattgtaaataggattactttgttgtttccttttcagattatttactgttggcatatagaaatgctactgaattttgtatgttgattttgtattctgcaattttattgaacttgtttatctgttataataactctttggcagactctttaggtttttccaaatataatatcatatcatctgcaaacaagggtaatttaacttcttcctttggatgccgtttatttctttctcttatttgattgctttagctaggacttccagtactatgttgaataacagtggtgaaagtgggcatctgtgttgtgttccatgacttagaggaaaaactttcagttttttcccattcagtattatgctagctgtgggtctgtcacatatggcttttattatgttgagttatatttcttttatatccagttttttgagggatttttatcatgaagggatgttgaattttatcagactctttctcatcatcagttgaaatgatcatatagtttttgtctttcattttgttgatatgatagatcatatcaattgatttgcatatgttgaaccatccttgcatccctgggataaatcactcttggtcatgatgaatgatctttttaatgtgttgttgaattcagattgctagtagtttgttgagggtttttgcatcaatatttatcatggatattggcctgtagttttctttttttgatgtgtctttgtctggttttggtatcagggtaccactggccttgtagaatgaattcaggagtattccctcctcctctattttttggaatagttacagtagaaatggcattagttctttaaatgtttggtaaaattcagtagcaaagctatcaggtcctgagcttggctttgctggaagactttttattatggctttgacctcattacttgttattgacctgttcagattttgaatttctttcttgtacaatgtatgtatctcagaatttattggcttcttctatgttttccaatttattggcatatagttgctcacagtagccattaacatcctttgtattactgttatagttgttgtaatatctcttttttaatgtctgattttatttatttgggtttttctctttttttcttagtctggctaaagctttctcaattcagtttattttttcaaaaaaccaacttttcatttcattgattttaaaaattgttctctgtatctcaatttcctttatttctgctcaatctttattattcattttcttctactaattttgggtttggttagctcttgctcttctagttctttaagatgcattgttaggttgtttatttgaagtattctacttttttgatctaggttcatatcactataaacttccctctcagcagtgctttctctgtatcctgtaggatttggtatgttgtgtttccactatcatttgttttacaaaatttttaaattccctttttaatttctttattgacccactggtcattgaggagcatattgttaatttttatgtgttagtatagtttccaaaattcctcccatttttgatttctagttttattccattgtggtcagagaagatgcttgatattatttcaatttttttgaatgttttaaaacttattttgtggcctaacatatggtttatccttgagaatgattcatgtgctgcagagaagaatgtgtattctgcaaccattgggtgaaatattctacaaatatctacaggttcatttggtcagtagtgcagattaactctgatttttctttgttaattttctgtctggaagatgtatccaatgctgaaagtggaatattgcggtctccagctattattgtattggggtctatctctctctctagctctaacaatatttgctttatacatctgggtgctccatagttgagtgcatagatatttaaaattgttatatcttctttctgaattgacccatttatcattatataatgacttcctctgccctttttatagtttttgtcttgaaatctattttatcttatataagcattgccactcctactcttttttgatttccactagcataaaatatttttccattgctttattttcagtctacttgtgtctatataggtaacatgttgtttttgtagactgttcagtcttattttttatccatttggtcattttatgtctttgattggtgagtttagtccaactacattcaatgttattattgaaaataaaaacttactcctgccattttcttatttgttttctggttggggtcttcacttccttcttccttttgttcttatcatcctttaaacaaaggcaattttctctggtggtatgctttaatttcttgctttttatgttttgtgcattcattgtatgctttttgatttgagattattgtgaggcttaaaataatatcttataatctattattttaaactgatgacaacttaacactaatcacataaacaaacacagcagctagcaaacaagcaaagataaaactaataaaaaactctacactttatctttatccccctgcattttaaatttttgttgtttctatttatatcttgctgtactatgtatgtcttgaaaagttgttgtagtaattatttttgatcagttcatcttttagtctttctacacaagatatgagtaggttatgcaccacaattatggtgttataatattctgtgtttctctgagtacttactattaccagtgagttttgtaccttcagatgatttctttttgctcattaacatcaatttctttcagatttaaacctttctttagcatttctgcatttcttgttctggtgttgatgaaatcccatagcttttgtgtctctcgaaagtctttctccctctccctctccctctccctctccctctccctctccccacggtctccctctcatgcggaaccgaagctggactgtactgctgccatctcggctcactgcaacctccctgcctgattctcctgcctcagtctgtcgaatgcctgcgattgcaggcacgcaccgccacgcctgactggttttggtggagacggggtttcgctgtgttggccgggccggtctccagcccctaaccgcgagtgatccaccaacctcggcctcccgaggtgccaggattgcagacggagtctcgttcactcagtgctcaatggtgcccaggctggagtgcagtggcgtgatctcggctcactacaacctacacctcccagccgcctgccttggcctcccaaagtgctgagattgcagcctctgcctggctgccaccccgtctgggaagtgaggagtgtctctgcctggccgcccattgtctgggatgtgaggagcccctctgcctggctgcccagtctggaaagtgaggagcgtctccgcccggccgccatcccatctaggaagtgaggagcgcctcttcccagccgccatcacatctaggaagtgaggagcgtctctgcccggccgcccatcgtctgagatgtggggagcgcctctgccccgccgccccatctgggatgtgaggagcgcctctgcccggccgagaccccgtctgggaggtgaggagcgtctctgcccggccgccccgtctgagaagtgaggagaccctctgcctggcaaccaccctgtctgagaagtgaggagcccctccgcccggcagctgccccatctgagaagtgaggagcctctccgcccggcagccaccccatctgggaagtgaggagcgtctccgcccggcagccaccccgtccgggagggaggtcgggggggggggtcagccccccgcccggccagccgccccatccgggagggaggtggggggtcagctcccccgcccggccagccgtgccgtccaggagggaggtggggggggtcagccccccgcccggccagccgccccgtccaggaggtgaggggcgcctctgcccggccgcccctactgggaagtgaggagcccctcagcccggccagccaccccgtccgggagggagatgggggggtcagccccccacccggccagccgccccgtccaggagggaggtgtgggggtcagccccccgcctggccagccgccccgtccgggagggaggtgggggggtcagccctccgcccggccagccgccccgtctgggaggtgaggggcgcctctgcccggccgcccctactgggaagtgaggagcccctctgcccggccagccgccccgtccaggagggaggtgggggggtcagccccccgcccggccagccgccctgtccgggagggaggtgggggggtcagccctccgcccggccagccgccccgtctgaggtgaggggcgcctcagccctccgcccggccagccgccctgtctgggaggtgaggggcgcctctgcccggccgcccctactgggaagtgaggagcccctctgcccggccagccgccccatccgggagggaggtgggggggtcagcccccctgcccggccagccgccccgtccgggaggtgaggggcgcctctgcccggccgcccctactgggaagtgaggagcacctctgcccggccaccaccccgtctgggaggtgtgcccaacagctcattgagaacgggccaggatgacaatggcggctttgtggaatagaaaggcgggaaaggtggggaaaagattgagaaattggatggttgccgtgtctgtgtagaaagaagtagacatgggagacttttcattttgttctgcactaagaaaaattcctctgccttgggatcctgttgatctgtgaccttacccccaaccctgtgctctctgaaacatgtgctgtgtccactcagggttaaatggattaagggtggtgcaagatgtgctttgttaaacagatgcttgaaggcagcatgctcattaagagtcatcaccaatccctaatctcaagtacccagggacacaaacactgcggaaggccgcagggtcctctgcctaggaaaaccagagacctttgttcacttgtttatctgctgaccttccctccactattgtcccatgaccctgccaaatccccctctgtgagaaacacccaagaattatcaataaaaaaataaattaaaaaaaaaaaaaaaaaagaaagtctttatttatccttcatgtttaaaggatgttttcatcaggtattctattctagggtttaaaaaacatcttcctttagcactatttgtttattttatttatgtatgtatttatttatttatttatttttgagacagagtctcactctgttgcccaggctggagtgcggtggcacgatcttggctcattgcaacctccacctcctgggttccagtgattcttgtgcctcagcctcccaagtaggtgagaccacaggcacacaccaccacacctggctaatttttgtatttttagtagagatggggtttcgccatgttgcccagtctggtcttgaactcctggcctcaagcgattcacccacctcagcccccaaagtgctggtattacaggcgtgagccactgcacctggcccctttagcactttaaatatgtcatcccactctcccctggcttataaggtttccactgataagtctgctgccagacatattgaagctccattgtatgattttgtgtgtgtgtgtgtttgttttgttttgtttgagatggagtcttctttgtcgcccaggctggagtgcagtggtgcaatctcggatcactgcaacctccacctcccgggttcaagcaattcccctgtctcagactcccaagtagctgggactacaggagtgcaccaccactcctggtcattttttctatttttggtagagatggggtttcaccgtgttggccaggctggtctcaaactcctgacctcaagtgatccatgtgcctcagcctcccaaagtaagccattatttgtttcttttctctaactgcttttaggattctttctttatccttgacttttgggagttcgattatcaaatgccttgaggtagtcttctttggattaaatctgcttggtgttctatcacattcttatactttaatattgatatctttctctaggattaggatgttctctgttattgtccctctgaataaactttccactcctgtctccctctctatctcttctttaaggccataatactctgagatttgctcatttggggctattttctagatattatagatgtacttcattcctttttattcttttttcttgtgtctcctttgaccatgtattttaaaatagtctatcttcaggctcactaagtctttcttctgctcaatcaattttgctgttaagagactctgttgcattcttcagtatgtcaattgcatttttcagctccagaatttctgcctgattctttttaatttcaatctctttgctaaatttatctgataaaattctagtttccttctctgtgtgtcttaaatttcattgagtttcctcaaatcaagtattttaaattctctgtctgaaaggccacattttcctgtgtctccaggattggtccttggtgccttatttagttcatttagtaaggtcatgttttactggatggtcttaatgcttgtggatgtttgtcagagtctgggcattaaagagttaggtacctattgtagtctctgtagtttgtgcttgtttgtacccatccttcttgggaaggtttcccaagtatttgcagggacctgagtgttgtgatctatgtttttgtgtcactacagccatatctgcattagtgagtacccagaactcagtagtgctcttggagactcgtagaggtacagtcttgatggtcttgattaagatccagaattatctgaattaccaggcagagaccctgttcttgtcccttacttccccccaaacaaatgcagtctctctcttggctgagctgcctggagctgaggaagggatgacacaagcacccttgtggccaccaccatgtgctgggtcagacctgaagccagcacagcactttgtcttgcccaaggcctgatgtaaccactgcctggctactgtctatgtttcctcaatgccctagggctctgcaatcagcaggtgaagaagccagccaggcttgtgttcttcccttaagggcagcaaactcccccaggccctgggcaggtctagaaatgcagttgggagcccaggatttgaatcaaaaacttcagaaatctatctggtattctattctactgcatctaagctgtccctcaaaccacaagacaaggcccttccccttgcacccttaacttaccacagtcagaggagcctctcccagtggctaccaccaccactggtccagtaggagttctgacgggccaccgccaatgttcacttaaagcccaagcctcctcagtcagcttgtggtgaatgctgccaggtctaggactcgcccttcaaggcactggtcttcccctggggtagattcactttcagtctatgtgtgtctatgtaggtgaagtgttatttttgtagattgcccagggcaggctcagaaatggcatccaagaggcaaggtctggaattggggacccccaagagcctgcttggttctccaccccactgtggctgagctggtacctgaagcacaagacaaagtcccctttattcttttttttttttttttttttttgaggagtcttgcttttgtccactgggctgaagtgcaatggtgtgatcttggctcactgaaacctccgcctcccgggttccagcaattctcctgcctcagcctcctgagtagctgagactacaagcacctaccaccatgtctggctaattttcatatttttcgtggagatggggtttcaccattttggccaggctggtctcaaacttctgacctcaggtgatccacccacctcggcctcccaaagtgctgggattacaggcaaagtcccctttactcttacccctgcttttctcaagcagaaggagtctctcctcatagccatgttggaatgtagtaggtcatacctaaagccagcacatctcagcgtctcacccaaggaccatggcatgtgctacccggctactgcccctgattattcagggcacaagcgctctttagtcagcacgtgatgaatcctggcaagactgggtccttttcttcatggcagcaacatttcttgggcccagagtgtgtccagaagcattgtccaggtgctagggccaagaataggagacttacaactctgcctagtgccctagcctactgtggcttagctggtaaccaagatacaagacaaagttttatttactcttccctctcctcatatggaaggaaaaagtctttcggtgccgtgagctacactgcctggggttcggtgaagggtagcacaagcacttctttatccaccctgactggtgtttcactaggtcctgtgtccctgaagtccactggctctgagcctaacacagcattaagacttgcctaggagttgcagtccttgtggcctggactgcctttcaagtttatttagaaccccagagcactttagtccagagtggtgaggcttgctggaactcaagttccaaccactcagatgagtggttcccatctggctaggacggtttaaatgctccctccatgggcaccagctaagttctgccctgtgttgctttccactgtggctgggtagtactgagttccaatgcaaagtcccataattgctgcactctccctcctccaagtgcacagagtcttcatggtacacagccactgtgaggatgggggaagggtgacatcagcaattcaagactgtctatcctaccctcctcagtgcctctttcagtgacatgaagttaataccaggtactgtgattgttcacatgatttttagttcttatgaaggtgatattttagtgtaggtagttgttgaatgtggctgactgccacagttactacttgagaccatcactatgacagttactactgttactacttaagaccatcattacaagactgaatgaagggggacgtatgcagaaatgaaaacttaagacaaaagtaactattttaaaggaaaggtaacatgtggaagaagaagagagatgaagagggctccctgcttctagtgagcaaaggcagccacctgaacctctacagcccttcgtatttattgggtagaaagagtagggaggaggaaataatgactgatcagctgcttaattgatcagaggttcacattgttgctaacaggcttcagatgtgcttaatcacaagaaacacttgtgcctggggcgtgactgccctcatcattccttctgggtgacagacacagtttgtcagttttccaacatcctgctttcatagaacagtttgctgtttactcatataacctccagtggtatactgagttgatcacgatcctcactccttcagcctgcaacagttcaattgcatgttcttgcagggaggatgatcagtggaggcttccattttgccatttgctcctcctccccagaagtcaagttcgtgattaaattttgattatttatatttttctattgatttttccgctttacattgccaaatatattaacataatgaattttatttcttctattaatataattatgtgtagttttttgtttctaatgacatttgtgacttatctcttctcgtgttttttgacttggcaaaatttttccattttattgttttcttggaagaatactagttgtttattgaagcactggattttttatatgtttttattttattaatttcagtctttaacttctattgatttctgtcttctacgtttttaggcttatgtattgttctttttttgacttaaatatttatttactttatgtagtacttatttttttccaaggagttaatttaagactacaaattttctttgaataatgctttggctaaattcaacaggtttttatatgtgcttattgctagatcatctataatgtcaatttgatttcttcttctttaatataggaattatttagaatactttttgttaacattcaagtgtagagattttaaattgcggtgtgcacatacttataattagttattgtaattagaataaataatttttaaaatgtggcttttatgaggtctactttggagaatgtgttgtcttctatgtagtctaatacatggacaatttatttttttatttatttttattataccttaagttttagggtacatgtgcacaacatgcatgtttgttacatatgtatacatgtgccatgttgatgtgctgcacccattaactcgtcatttaacattaggtatatctcctaatgctatcccttcccccttcccccaccccacaacaggccccggtgtgtgatattccccttcctgtgtccatgtgttctcattgttcaattcccacatatgagtgagaacatgcggtgtttggttttttgtaatacatggacaatttaaaaaatacattctagaggtgatcaaaaaagaacttgtcacgcacatctgtgtgaagagatcaccaaacaggctttgtgtgagcaataaagctttttaatcacctgggtgcaggtgggctgagtccaaaaagagagtcagcaaagggagataggggtggggcagttttataggatttgggtaggtaatggaaaattacagtcaaaggggttgttctctggcgggcaggggcgggagtcacaaggtattcagtgggagagcttctgagccaggagaaggaatttcacaatgtgatgtcatcagttaaggcaggaaccagccattttcacttctcttgtgattctacagttgcttcaggtcatctggatgtatacttgcaggtcacaggagatatgatggcttagcttgggctcagaggctgacagaactattctatgttgaatacagtgttgtacatatatgtgaatgtttcatcagtcttaattgtgttgtccatgtactctatgttcttattcattttttatctacccaatcttttaatttctttaaaaagatgtcttaattccccttttatgaatgttaatctgataattatctttgttcttccaataaattttctatgtttcaaaataatttttggtatattatctatgtgctttttgctcttggtaatgtcttctttccccgtttttcttcctcccttcaaaccagaccttagatctttcttgcctcaagggaggaaaactgctacagaaaagaaaacagaagaaaataaaattcaatattagagttgaatgcttttgagttgtacatgcctgcatttcacaaacctaacttatgatgtattacagtccctaagctatgtaatagatttgcaagaattatgatgttttaatagctagtttttactatctcagactaaatgcaggtatactttggagatattgcaggtttagttccggaccaccccaataaagtgaatatctcagtaaagtgagtcacatgaatttttttgtttcccaatgtgtacaaaagttatgtttacattaaacagtaatctattttgtgtgcaatatattacgcctaaaacatatacataccttaattttaaaatactttattgctaaaaaattctaatgatcacctgagccttcagtgagtcgttttctttttgctggtggagagtcttgcctgctgttaatggctgctgactgatcaataaggttgttgctgaaggttgaagtggctgtgacaatttcttaaagtaagacagcaattacatttatcatatagattggatctttcacaaaagactcctctgtaacatgtgatgctatttgatagcattttacccacagtagaacttatgtcagaactagaatcagtactctcaaacccagctgctgctttttcaactaagttcatataatattctaaatcctttgctctcatttcaacaatcttcacagcatctttgccagaagtagttttcatctcaagaaaccactttctttgctcatccataaaaagcaacacctcatctgttcaagttttattatgagatttcagcaatttcatcacatgttcaggcttcacttctaattctagctttcttgctatatctaccacatctgcagatactccctctactgaagtcttgaaggcctcaaagtcatctatgagggttggaatcaacttcttccaaactcctattattgttattttgacctcctcccatgacatctaaaatggtgaatcttttccagaaaattttcaatttactttgcccacatccataagagaaaccactatcaatagcagctacagccttacaaaatgtattttttaaataataagactttaaaattactcttgatccatgaactgcagaatggatgtttagtgggcctgaaaacaatattcatctccttaaacatctccatcagagctcttgggtgactaggtgcattgtcaatgagcagtaatattttgaaaggaatccttttttctgagcagtaggtctcaacagtggacttaaaatatttattaatccatgctgtgaacaaatgtactgtcatccaggctttcttgttcaatttatagggcacaggtagcatagatataacataattcttaagagccctaggatttttggaatggtaaatgagcgtgggtttccacgtaaagtcaccagctgcattagcccctaacaagagagtcagtctgtccttcacagctttgaagctagacactgacttctcttagttatgagagtcccagatgaaatcttccaacatatgactatttcatctacactgaaaatctatttagtgtggccactttatcaattatcttagctggataatttgttgcagcttctatattaccacttcctggttgcactaatatattatgaagacagcttctttacttaaacctcatgaaccaagctcctagcttcaaaattttctcctgcagcttacttacctttctcagccttcatagaattaaagagagttagggccttgctctggattaggttttggcttaaggtaatgttgtggttggtttgatttatctagaccactaaaactttctgcatatcagcaataaggctgtttcactttcttatcattcatatgtttaccagagtagcacttttaatttccttcaagaacttttcctttgcattcccagtttagctaacgggtgcaagagccctagttccagcctgtcttggcttttgacatggcttcctctctaagcttcatcatttctagcttttgatttcaagtgagagatgtgtggcttttccttccactggagcacttggaggacacagcaggtttattatttggtttaatttcaatatttttgtgtctcagggaataagaaggacaggtggagagatagggaaaggacgagttggaggagcagtcagaacacacacaacatttatcggttaagtttgccatcttatatgggcaagatttatgacaccccccaaaatttacaatcataacatcaaagaccactgatcacagattagtgtaacagatataataataaggaaaaagtttgaaatactgtgtgaattgccaaaatgtgacataaaaacatgaagcgagcacacgctcaataaaatgaaccacagtggtcaggactcaaagtgatttcaatgaactggagtgctaggatatctagctaagataccagcaggttcaagctgggtacagtgatgcatgcctgtagttgcagctactgtagaggttgaggcaggatgatcgctggagccaaggagtttgcacaatgatcacacctacaaatagccactgcactccagccaggacaacttagcaagaccctatctctaaaacaaacaaacaaaaatcccacaaaatttagcaggaaccaattcaagttgtatagggcctgaagcctatagaatttgaaataccctctttaacaacaacaaaatacaacattatgaataacgacaaaaaagaatcaagtacaaaagtaaatatttattagcatgggaaagaaatcaccacagtcttggagttatgtccctttattcagagaagcttactttaaaatatttcttgattataatctagtttttattccccacctagaacactctacaagtcccagaatctctcagcattcacagaggccatacgaatgaaagaccctgaagcttaagctttattagcttcagagtataactacctctggcaaaagttctacatttatgttaaaataattaaattttatttttaaaatagagaatgaagagagcctgactttgagacacttgtgttaaaaaaaagtcaggggaattttcttcaatcacaatcttcctgtacattaatattatgacagtaaataaaagtgggccagcttaggcaaggaatattctaactttaacatatgcattagccaaataacttcggggagttcaaattgaaaaagaaacattggcaaagcacagccatctactaagggaagcagataatatgacgagagagattcttgccatatgaggaaaggactactgaaagaactgaagtgtttggctttgggaagtaaatgctgctgggagagagctgatgagcagccgtgtgccacttcaaactatactacaaggttacagtaaccacactgtatgacactggtacaaaacagacacataaaccaatggaacagaatagagaatgcagaaataagaacacatacctacaaccatctgatctttgaaaaacctgacaaaaacaatggggaaaggattccctatttaataaatggtgctgggagaactggctagacagatgcagaaaattgaaactggaccccttccttacaccttatacaaaaattaactcaagatggattaaatacctaaatgtaaaacccgaaagtatcaaaaccctagaagaaaatctaggcaataccattcaggacataggcacaggcaaagatttcatgacaaaaacgccaaaagcaattgtgacaaaagcaaaaattgacaaatgggatctaactaaatgaaagagcttctgcacagcaaaagaaactatcatcagagtgaacagacaacctacaaaatgggagaaaacttttgcaatctatccatctgacaaaggtctgatatccagaatctacaaagaacttaagcaaatttacaagaaaaaaaaacattaaaaagtgggcaaaggatatgaacagacacttctcaaaagaagatatacatgtggccaacaaacatgaaaaaactcaacatcactatctttagagaaatgccagtcaaaaccacagtgagatactgtctcataccagtcagaaaggcgattattaaaagtcaaaagacaatagatgctggagaggttgtggagaaaaaggaacgcttttacactgttggtgggggtgtaaattagttcaaccattgtggaagacagtgtggcaattcctcaaagattgagaggcagaaatatcatttaacccagcaatcccattactgggtatatacccaaagaaatataaattattctgttataaagatacatgtacacatatgttcattgcagcactatttacaatagcaaagacctggaatcaacctaaatgcccattaatgatagactggatagagaaaatgtggtagatatacaccatggaatattatgcagccataaaaaggaaaaggatcatctcctttgcaggaacctggatggagttggaagccagtatcctcagcaaactaatgcaggaacggaaaaccaaacactgcatgttctcacttataagttggagctgaatggtgagagcacatggacacatggggtggcaggaacaacaagattgggtgggaggagggggagcatcaagaagaacagctgatggatgctgggcttaataccttggtgatggcatgagctgtgcagcaaaccaccatgttacatgtttacttatgtaacaaagccgcacatcctgcacatgtacccttgaacttaaaataaaagttgaaggaaaaaaaagaagacttactcctattgttctagagaaagaaagagtgagagttgcaagcagccgatttcaacccaaggtaagtcaattcaattcaataagtatttatgatgtctagtatttgccagaaatgttttccggcactggagataaagcagtgaccaaaatggacaaaagttctcctctcatcgagtttacattaatgcaagagagataaacaataatacataaatatataatatgtcaagtgttgaggtgatgatgtaccctgagaagaaaaatacagcaaagtaccagcaacagtgaattgagaacaaaattttttaaagatgccaaataaaattgcatcaaaaagcatcaaatatctaagaataaatccagcaaaatatgtgcaagacttctacacagaaaattgtataaagcattagtgagagaaattaaagaatacttaaataaatagaaggctatactgtgtttgcagattggaactctaaatattatcaggatatccattttctccaacaatcgacctatagattcaatgtaattccccaaaattaagggggagtgtgtgtgtgtgtgtgtgtgtgtgtgctgatcagatgattctaaaaatgtatatgaaagtaaatggccatggagaggcaaggtgatcttaaagaagaataaagttagagaacttattgtaccagatttcaagactcatcgtaaagccacaataaataagacagtgtgatatttcggcaaaagaacagacaaacaggctgataggatacaacaaagagtaaagaaacagacccacatgtatactggtactttatttatgacaagggtgacacagagcagtagagaaaggtggatatttttaataaatggtgccaagtcaattggatattcattggaaaaaaatgaaacttcacccatacaaaaatcaattccaggtcgattttagatcttaatgtaaaaggcaaaataataaggcttttaaaagataacattggagaatatattcctgacttgatgtagacaaagttttcttaagcaggactaaaacacactaaccatcaagaaaaagattaataaattggactacactaaaaataagaacttctattcataaaaaggcactattaagagagtaaaaaggcaaatcacagaaatggaaataatgtttgcaatatctatagtcttagtaattaaaggataatttttaaatgttttcaccacaaaaaatgttaagtatctgagatgatgaatatgttaactagctgactttattacacacattgtattagtaaattataaaatcactttgtaccccataatttatataattataaattggcaatttacaatacaaaatctatacttgacaaataacctatgcctaaaatataaaaggaacacttacatattagttttttaaaagagaaataacccaatttttttaaaggaaggagagaaggaaagacaggcttttcattgaagcgactatccaaatagtcaataaacattgaaaaaggtattcagcttcactaatcatcagggaaacacaaattaaaactgcagtgagataccactttacaccagccagagttataaataatgttttttttgtttttttgtttttgtttttttgtttttttgtttttttgtttttgacggagtttcactcttgttgcccaggctggagtgcagcaatggcacgatctcggctcaccacaacctccgcctcctgagtttgagcaattctcctacctcagcctcccgagtagctgtgattacaggcatgcaccaccacacctggctgatttttttgtatttttagtggagacggggtttctccatgttggtcaggctagtctcgaactcctgacctcagatgatccatctgcctcggcctcccgaagtgctgggattacaggcgtgagccaccacgcccggccataaataatcattttttaaaagattataccaagtgttggtaaggaaatggatacgtaagaactctcatttgctactggtggaaatgtaaatgagtatgaccactttggaaaattctttggtaatatcctctaaagctaaacatgcataccttttgacccagtaattctactgccatatattgctcaacagaaatgcaagcacaggcacaccaagaagtagctacaagaatgttgatagcagcattgttcgtaatagcttataactggaagcaaacttgaatgtccatcaagagtaaaatggttcaataaattgtgatagtcatacaacagaatattatatagcaatgaaaaggaaaaaaactactgcaaaatatggttgaatctcacaaacattgttgaaagaagctagaccaaatgattatttaataaatagttctattaatacaaatataaatgatatatagtgttataaatcaggttagtggttactctgtgggtttcacagaatgaaaaaggctatggagggtttctatagtgctattcaagttgtacagatttctaaatgtgtgctatatttcaataaaataagtaaattaaaacaaaaccgaaaataggctggcacctgagtttcttagagtaatccaagacgagttagggctgtgggtgaaagattgagaaaacactacacttatgagacaagagactgggaatccaggaggaaagatagtcaaggagaaattcacagtagctggattgcctaaaggtttttaaagaacagagtatttaatgttcactttaaaattgtgttctattatgcctgtaatcccagcactttgggatgccgaggcgggtggatcacgaagtcaggagatcgagaccatcctggctaacacggtgaaatcccgtctctactaaaaatataaaacattagccgggcgtggtggcgggcacctgtagtcccagctactcaggaggctaaggcaggagaatggcgtgaacccgagaggcagagcttgcagtgagccgagattacgccactgcactccagcctgggcaacagagcaagactccatctcaaaaaaagaaatacaaaaaaatagccgggcatggtggtgcgtgcctgtaatcccagttactcaggaggctgaggcaggataatagcttgaacccaggaggtggaggttgcagtgagccaagattgtgccactgcactccagcctgggccacagagtgagactccatctaaaaaaaaataacaaaacaaaatttaaaaattaaataaaattgttttcgatgctacaatttgctctaaccactctgtgactccatctccaccaccaattttattgttctcaagccatcagtaaagtttacaacaccccaaaaacgcagggtaaggaaacagtgatggagtaagatgaaagaggggctatgtcatttatgagataggaaagccaaaggaatacctctctgaatagagagcaaaagaagggagggatcacaaggttaggagttcgagacaagcctgaccaacatggtgaaaccccatctctactaaaaatacaaaaattaaccaggcatagtggcatgcacctgtaatcccagctactcaggaggctgaggcaggagaatcgcttgaacctgggagtcagaggttgcagttagccgagattgtgtcactgcactccagcctgggtgacagaacaagactcagtctccaaaaaaaaaaaaaaaaagagggagaagagagctccagactgagagaaggaaatgcaaaggtccaacacagggtatgctgggcacatccaaagaccagcaaggaaaccagtatgtgtgaagacaaggaagctggtagagagatcagagacacagccaggacccacatgatgatggccttaatgggccatgaaatttactgaatttcactctgagacaggaatccattacagacatggttttgagcagggaaatgaccgaatccaattttatttttaaatgtgtcattgcagttgctttgggaagaacagcctgtaggaaggcaaggtcagtgcaggaaaaccagataggaggttttctaagagaaagatgatgccagcttggatagggctggtagtggtggaggtaggaaaaagaggttgagtctggatgtattttgaaagtcaatccatcaggacttgtagatgggttggagatagtaagtgaggaaaagagaggcatcagaggtgtctcagtaaagaatttcctaatccaattgaacaagcttcccctgatgtagctcctccagtggaagcatttagtcctttcactggactgtctgaatggtcttttccctacagcttatctgccctatatgttcccaagtggctttctgttcttagcagtcaggggcccaggtgatgtctactcaccaaatattcttgaaccataaggcaatcagattatggttttgtacattatggattttcagactttatggtttcaaaataaatttcctataccaaagatactttttaactgctggggaccctataaacccttttttccccacacatccattttaatactagtccaaagggttaaaaaaatagcaaggggagctgccttaggggaaacagaggccacacgatatggaatttggggatgggaaatgctggaacatgaaaggaaggaggaacagccccaccatcttggccctcggggatgttaggaatagagggtataccaaaagaaggtgtaagggagtaaatgattgaagtgtaaacctcccaaatgttgtctctttcaaaagttaccttagagagaatctgctagtgctctgttaattataccatggtcacagaggtgctgctattgttctgagcttacttggaaccctttttttggatctgtccaaaaggagtgaatgtaacttgctccaaaatctgtgtttctagaggttagatacctgagaagccctgctgtcaagaatcccagattctcctggttggcaggaactttaaagcttctagccacagcgtttgagctcccaaggctgtccttcagcatcttcccaggcagccctgattcattgtggactgaaacctttctgtcattccttctatccactggtcataatagagtatgggcttgtatttccaaaatttaaacatcactggtcctattagttcttttagatctttctttcaagttgctcatttttctcatataagaaaatttaccttaaatggaaaccacatcactttgtcagtggaaaactatgtcaattggaacttaactgcataaggaataataacagatggaagagaaaacaatgatattaaattctacttaggagctgttgcctagcaaaggttctgagtgagaggcaacctctgtctttgttaaaacaggagattagcaagtgttacagaggggtgcaaagacaaatactacaaaaatgatactccttccttgacataatccataggaacaaaagaagtaaaaagggcatatcttttttcaccttgtgatccactgttatctaattgtattgtctgtgtaccacccaataccatgcttccaatctctactggaagatgtacacactgggacacactggtaaagtgatcaagcaccaggactgtaagtcaagctgatcaggttcagctcttggctctgccaactcctagccacccaaccctaaatacctgaaactgtatgcatcagtttcttcgtctttaaaatggaagcaataatagatcttcagagtaatactttcttaaagatagtgcccaaatttggacattatgcccaggtgtaatccgaccagtgaagagcatcagttcagcctaagattgcagcctcattcgggttttgaactgaactcgttcagcctttgggtgttcacaaagctgtgcttgtagccaactaaaataaaatctaaggtattttgataggcaccactactgagccacatcctccattacttacattgctgggtgtttcggcctgagggaggacttcacatttattcctattaaccagattttgcccccttcactggtgctttagcatttgctcagctccttctcctaccctgtatttgagggaaaggaagccaaatgggcagaacttggccataatgaggatgtgtttgacatgctggatttgagtctgtgttccattgaagaaaagaaatggaaactttgttgagtatccattctatacagggcactttccttgactatttcatttaacactccaaggaccccctgaggtagatgttatcgccattttgcagagaagaaatctgcatttttatttgaagttcttaaacatggtaaacgacccaattttctgctttttgcttaacagtattttgcaaacattttatcatgttacttcatgttttcctattttttttttgctttataaataaatacatactccctccttattctaaaaagaatttgaagcacttctgtcttgatgtttatcattttaatggttgtataatgtcccattaagtcaccctaatttattcaacaaatttcctactgttgacagtttggctctgtttgctttttgtggtttttaaaattattttctgtaacaaatgatcctgctaaaaaaaaaatctccgcacgaatattattttgttctggaaatttccgcaagggtggaatactgcattaaaggggataatatttttggtgtttctttatagagcctagcaaattgcccacccaaaggagtatgctttatttgagagtaaaaagccaaaaacaaacaaacacatacaaaaaaactggttttctacaaaagaaattaattttccacttattcataaaatattctagtgctgtgatgggtggcaggcaccgtgccaggggctagggacaaggataagcaaggccaggtccgggcctccaagcagcgcgctgtggagtcgggtagagtagaccaagtgcaacaggcacctggctgcagccaggaaggaccgcacgccctttcgcgcaggagagtggaaggagggagctgtttgccagcaccgaggtcttgcggcacaggcaacgcttgacctgagtcttgcagaatgagtaagagtttgggcacgcgatttgtatttattttactgtgaatctctggccttatatcagaaaaaaaaaaattgtgccaccctcggcacagagaacgttggtggcgtcgtaagcgccctaagcttctttccatcgccaaggagtaggggtcagggaagaggacagcgggaacaggatttgagagccgggaacccctggctcggcacgggagagggcaggagaggacctaagcgcggggctcgccgtctgctggggacccgagccggcctgtggccctcggggaaccgaagacgcgccctcagcgaccctgaagagtcagctaagctctctgcgggctaaggagacggtgaaggaaccgggactaactggggtaggggttagaaggcagcccgcgagtgggctacgaggggagctgggctcggcagttggggaccccgagggggcaagcgggcggggagcaggagaggggcggagctccggggccggggccggggccgcagcggccgcccagagggtctgcgggggctgctgtggccggacccgaaggcgggcgccgggagcgcagcgagccagacgcgcctctccaagaccgtgaccttggcatagggagcggggctgcgcgcagtcctgagatcagaccagagctcatcctcgtggagacccacggccgaggggccggagctgcctctgtgcgagggagccctggccgcggcgcaggtaggaccggggaacccaaggagggcgggaggaaagcgcccctggtgggggaggggccgtggcggggtctgggggccaagggctccgggccgaacgaggggcacacgccggagcagctccagcctgggagcattgggcgtgaacgtgggggaaagtagggaccagattacaggatcaaggctttccccggctcagaactggattgttcagtgcccctagaaggggcagcgggtcgcccacgcgaatgaacgggagcgcgcaccaaaacgcctgctgttggtagtttcttgtgcctctgccttgtttctgcctgtgatatagtcagaaaggactcgcttgccacgtgttaacaaggggacaggtagcttttacagagtgtatgaatatggaggggagggccacagagtcagctctggccccaggggccgtcagtgcccccacaggattcctggtccaagctaccagctgtcttgggaactttgcttcagtggcatcaaattagattgtcagttcccggggcctgagcaccagcctccatgtgtatttcctggggagaaaaaaaaaaggcataccagactgatggagtcttatcattattttaacattatagctttcaatagataacatgcatatgtttctttttttaagtcaaataatacaaacatttatcttctacaggcaatgcgtgcactagcatgtgtgtctattgctgtctcctttctacacccatagcctttcccactctacgtgttctgtcgccgtcttttgattctttatccagaaaatgatgtcaccaccactgcccacatcccttaatctccagtgttcctccttgcaacgcctctcttgtcctcaaatatttttcacaaggtggtcctcagggtagggagcctactaacgagaagacatttcgtttacttgcttcaattatcccagagatttgaagaaaaggcacattggggaagagtccatgtcaagttctaaacacacttatctttccccttaaactggatcttccaagtgcagtttaggtagtctgttactgagagaaataatgcaggctgttttctgaaatgctctggatttccagaacttaacaccacagtagttcctattccttaaaacagaacttcatcagtcacaccttgctgttgcttttcccatctccactccaggattccctaactggcatgcctaggatttttcctctgtaggaacctgggagagcgggtgctttatacctgcctcccaggtgtccaatgaaggggctgagggacaaagctttgtggtggacaaaaggggaggggaagatgtaggagaagttggaggggaagtaggaaggaagaagcaggccaagacccttgagtagagaagactcctcaagcacagagccctgtcatttgggaacagtctccatataatttctaagagaccacacatgcgagttacttcctgccaatacagcacagtcagctctgttccaagacttctatgctagaccaaaacatagtaagtgaaaaaaaaaaatcagcaaatcaaccagtttttgtctctatgataaaacagagtggttgaaattaaattagttaaaaattttcttttttactgaattagcaggttctttaggagctgtgtccattgtttaaaatcacctaataggtactccagtctccacatttttcctttattttgtttatcttttcatattgcataaccttgaactggatcccaaccatgtcagaaagttcaggctgattagaagctgccacttctaagactttttggtggaagagagtggggaggagagggtgagaaaataatgactgatccttgtgatagggtaggggtataatgaagaggaagaagttaactacaagtttgagactggtgaggagttgcatataattcttaagataacacggcaataagtaagtaagaggtaaaaaaatcattcatcattcatcattcaaaatgtttatagagtgcctggctatgtgccagtcactgggaactaactggtatataaaaccaggtgaggtccctgctctcctggagcttacagatgctttggggtggcagctgttaggaaaataaatattgactatatgttattacaaactaagataaactgtctgaaggaaagaaacgaagttctttgagggtgtatacagactgaactgtgagaccagggaagcctttctcaaggagatctcccttgagccaagattcaaagatggagaggaaggttgaggatatatttgttgtttacgtaggaccagaatgtatccactaggaatggtgtttggctgctagtcattaagaagactaactgccatgtgacatttgctgtactacatgagcacatgtgccaacttggcatttttggcactttgggaaagaatgctttgttatcacagtatcagttgcattgtcttcagttggtcatggtttgccattgctgtattcttgctttataattaaatgtttcaattaactttatgcttatccacttattttattgtgtacaataaaatgtgtgcattgcagttcaaatgtgaatcatccatattcccattaataaggtaaatatatatataaccctgataccaaatgtggtttatacactgactgttcaatgttatcactaaatagattctttaggtgaaaataggtgtggcaggtgggctgtaatatcttccttccatccctagccactgctctaattgggaggatgccagaatttttcaattattctaaagctgcatgatccttttcaaagattcatatatagctctttagtaaagaaaaaaaatcaccaattgcactgaagcaacatatttaacattcaaacaaatatttttattcattcgacagtgtttacagtaaaccttgtatgtgctcagagctgtgctagacagtataattaaaactgattactaggacagagtcccaacatttaaggagttcatagaagtctgagagggagtcatgctcatccatgtgcaggtagtattgtgttcattacaattaaagcataatcagggtacgttcatgtataagggaagggagtggtcaattctaccaaaggaggaagggtcagggaaaggttcttggaggaggtaacgcttgagttgaatcttgaaagatgaggagtgacaccaggtagacaaaagaagaaggtataatgggagagagattcatgtgcaaaaacaagcaattaacaacaactaaaccagaggcatgaaacatcatgtcaagttctaggacctgcaagtggttcaaggagctgaagcataaggagccaagaggtagggaggctagcaaagtggctaaagtatgcatgatggggtcacagaaacaaagatttgagtcgtggttctgccactttctagctgtgggacctcagttaagtaatttagccacagtaattaatggtaataaaggtaatactttcctcataggattgctgcaaagattcagataagatatgcacagattatgtactcaggaattgttggctattcattatttattctagggcaaaggaagctgctggagggttttacatagaggagtgactcgtgagcatttttgcaatcactctggctgcatgtggatgctgagttgaagggggctcatttggaacaaagtaaatatttagagacattataaccatttagataatggtaatgatggcctgaaccatggcggtcatggcagcagccatggagaaaactagctaaatgcttgagatatcgtcaaagtagactccaccacagaactaagttactcattagatgtggtcagtgagggagaggatttgaagaggtgaagcctgagattctggtctgttatcctttgactctgtcattcaagtgatcttgggatagaaaagaagaagtgagtatcaaccaggactggggatcaggaatctgggaagtgcttgtatacagagaacttcatgatcggtaccaaaaaaaatgctatctctgattcagaagagcccttgaccatttctgtgtctgaacataaaataggatcagttaatccataccaaatataatatccatcttctctctctctctttttctctctctctatttctgggaggctttcagttcaaagtgggtggacattagacttcacctatttgtcattgccttgaagtgacagatgtaccctcactccatgcctggtactgttggttcaactcttgcctgacaccagcctgattcacttttttctcctttttctcatgtcttctcatatacaataagcactaactgaggtgtccacatggactttattaaagtccatgagaattagaggattcaggtagttcctatttcatcatgcaatgcagtcttggtaaccacagtatccattcataaggcaggaaacaatacagacatgtgtgatagtgtttgttgaaaagctgccgagagctttattactgtttccaccaaaggtggatactaggaagtgctgattaagggtgtgcttttggattcagttgctcaaacaactgtattattactcaaagccacagaaatgaacattataattaggcagagccaaatgagtgagatggtcaaatatgaaatgaggaaaacaagatcagcctctgccgtggacagtctagtttggtggaaggtgggctttctatctctgaccttcagcatgacattaacctagctgagcctcagtttttagtggtggaccttcctttgagatctgtgaagctaaggtaatgtctccttcacagggcggttgtgaagtttaaatgagttaaatgtgctaaacacaatgtgtggcgtatggtgggtgcttaactagctgatatcctttggctcagttaatccccagggtctttcctcacattgaaaaagcaggaagcatgcagatttcttgggttaagtaacctgaattaatttgttttaatgtgtttttcatctatgattgattttttttccctgggaaccagggtggaaacctgttttcctccaccctcagtgaatgcttatcagtgatgatgggggcaaaggtaatatgatacctgcagagaggaaactaattttagccattcttccttcaacaagtctgtcacacacatgcaagtaaaattactaacaaatagaaaaattgagtaatttgacttcttcctcccatattttctgttggtagagttcctattaagcatattttttgtttatcttttgtttttcatgtaggtagaaagaagcaggctcaaagaaattgcagttgtacccctcaataattgtttgtccttaggaacaaagttttgcttttctcctcttaacagaagttgatggttgaaagaattatcatatctttcatatagtttttctaaatattctataatttgacataagcttttagtttagttttgttcaccagttgggtcccaactgcatgtcagatgttgagttggcactgtgtactcagagacgccagctgtggtgcccagatctccagtctggtagcccttgtgagagagactgggtaggaagagaagtggggtggagggtgcaagctgatcttaaacagctgatggtggtgggagtgacactcaggctgaggctctctaccacagcttcaggcttccagtccatccaatcatgcactcctttgggtcaggatctgggtctactcatcccagtgccccaagcccctgccagttagagcccttatgtgctaagtgcttgtcgattaagagattcggggaaaggtagtgaggaggctaggtgatcttctcttttcacactcttaaaaatgaaaatagtccaagtaaagtttatactccatgcaattatcaaccaatttccattcatcctcatcttttgagaggcagtacactgcagtggtaatagcctagggccaggaattagactacccgagcttgtatctcagtttgacagctcactagcttcgtgaccttgggcaggttgtccaacctctctatgccccattttccttatctgtaaactgcagttaattaacactacttacctctttggttgttaaaagacttatatgagctaatacacgttgttaaagctcatcaagcatagacagcgtgtcttattcaacactgaaactccagaatccatcatagtgcctggtacactggaggagctgaatgaatcaatgaatgaatgaatgaatgaacaaatgaatgagtgacttagtgaatgaacaaatctcagtatatagactggtataacagtcagcaattgacaaagcaccctcttaatattaattcatttgattcccagaacatgtcaggagataaataaggcggctgagcagggaaggtattatctccattttacaaattaggaaaccagggtactgaaaggttggcttgccaaagaaagtgcaactataagtaaaagatctggttaacgttgctgattctacttactcctagctctctgctcttctcaagattcagctgcctctccaccttatacagatttcacagaactcaaaggatgtccaccagcaaaaatgaacacacatagcttatttagctttctgaagaaatgagtttcttactgtaaatacactcagtcaagttaaaacttaaagttgcaacttgaagtttggaatgtttttatgttttggagaggggagcagtggatattttgtaagaatgaggaagttctttctaagtataaaagtagcagagaatcatgaaggaaaatattgatagatttcattacataaacatttaaaatacttgggtttttttgttttttgtttcattttgtttttttgagatggagcctcactctgccacccaggctggagtgcaacggtgcgatcttggctcactgcaacttctgccttccgggttcaagcaattctcctgcctcagcctcccaagtagctgggattacaggcgcccaccaccatgcctggctaatttttgtgtttttagtagagacggagttttaccatgttgcccaggctggtcatgaactcctgacctcaggtgatccacccacctcagcctcccaaagtgctgggattacaggcataagccaccatgcctggccaacgtttaaaatacttgtatataaaaggttataattaaattaaaatgaaaataaactcaaaaaaatttgcaacaaataagccaaaaggttcaaatttgtgaatataaagaactcatagaatttaataggaagaacattaagaccatggtttcaaaaaagtagccaaaggttgtaatggttttcaaatgaagacaatcacatgggtggtgaaacatacaaatattttaacttttcttcaataagggaaacatttttacaatgatataccaatttccttatcaggaacattaagatgttgaagataatgctagtggagtggggcacaatggaaactgtcataacaaattacctggaaaacaattgccttaaaactgttcacagcctttgaccaaagaatttcattttggggattgtatcattaagaaattatcagaaatatggttaaagacttatgcccaatgatgttcttcacagtgagaatttgaaactgaaacacaagaaaaagcctatgaatccaataataagggaatggttaaatacagtgtggtggataggaagcagcataggctagcagctaaaagcatgattttgagtcttaccacctggattcaaattctggctctgtcatgtaactgtcatgtaactctgccctgtaactttggaacctctccaggctctacttttttcatctgtacaaaggggacgataagagtatctaacatatagggctgttatgtggcttaaatgggttcatacaggtctacacttccaaaatcttcaaagctctaaacaactaaaggttttatgtaacttaaatagcaacaaaacatcagtgaactgacacagatctactttattccatttactgtgactgtatttggcagatataatcaatgttaatccctttccacagttttacctttcttgcagaatctccaagattctctttatgaattaataacaatcttacacatttgaaaaagactaattttgaagtcaaagctaactagagagcaggtatatgtattttgaactaatctcttggccaagaaactttcccaaatcttccatcccagggctctcaaactttaaggtggggaatattcttaatgcatagattaccaatgtctatcccctagaaaatctgattaagcgggtctggagtgggggccaaatgtatatagttcctgcgagctcccaggcgatgatggtaaggctgatccatggatcacctcttttctctgctcttctcacgatccagctgcctctccagcttatacagatttcatggaactcctgtccaccagcaaaaatgaacacacatagcttatttagctttctgaagaagtgaacttcttactataaatatgctcagtcaagttaaaatttaaagttacaacttgaagtttggaaagtttttaacttttggagaggggagcaggtagcctcactctaatccactccttctttaattttcatcacccctcacattgtatctttttatttgaaccttttcatttctgaaaatcttcgacctttttttttcatattatcattctcctattctttcatttctggttttttttttgtttgtgtttgtttgtttgtttgtttgtttgttttttgagtctcactcactctgtcacccagtctatagtgcagtggggcgatctcagctcactgcaacctccacctcctgggttcaagcaattctcctgcctcagcctcccaagtagctgagattacaggcatgcaccaccatgcccagctgatttttgtatttttgatagagacaggatttcaccatgttggccaggctggtctcaaactcctgacctcaagtgatccatctgtcttagcctcccaaagtgctgggattacaggcatgagccaccatacccggccctatcctctcatttctatggggtgcttttattcctagaaatagtaatgtaataaaattatttatcagtttctgagtacctaccatgtgccagtaacacagttaaaaatggaaagtttcttggccaagagattagttcaaaatacatatacctgctctctagttagctttgacttcaaaattagtcttttcaaatgtgtaagattgttattaattcataaagagaatcttggagattctgcaagaaaggtaaaactatggaaagggattaacattgattatatctgccaaatctagtcacagtaaagtaacacagttactacagttactttacttttttttatccttctgacaaccccgaaaggagggttattggaagggtttttatactttatcctttttatcctggaagggataaaaaccctcccaataaccctcatttaagtgatgagaagactgaggtcctaggcctgagggtttgtaggtggtggaaactagtcatcttggccccaaagcctaagctgttttcattttactgtcctgcccatttcacatggtggtacacatcccgtgctctccagtctacacgccttctcattcctgcctccactacttaattcctgcagagtccccagcttggaaccccctatctccttatcacctattcaggtaccaatctaggccttctataacatgaagtgtccccaaatatactcgcacagcccacactcagctgcatctgttgttcctagttggccttttatcatatatgcatttggtttttttcaccaagggatttttgtcttcctaactggatttagagctccttgaaaacagggccgatctcatgcatctctgggtcccccttggaacagccatggtgaggactgattgcctccttcacccccgcactttctactcttcttccttcctgtccccctacccaccacttgtcccttcctatcttggtgaaatcaagccacaccaacaagaaggcaaaaaaaataggccaggtttcacccttcctaatctccttccctgtgtggtttgttagtgtttgccttgtggttccacaatgtcatgagaaggaagtctttttatgagaaggagcttttctcatcaatgttatgagaaggaacttttcctctacttggcagagaggtactagccatgtcttataacccttggccctcttgagggtttccagaactcccttctttccatgtttattcaaattccattttcattatcgtacttcccagtttcacccaacatccacgttatcacccaagtatatgccaagagtccttgcctgcccattcccagcttatacatctatggagctactttctgcagtgagatctgttgggagcagcatggccaacacattcatttggtccgtacactttagttatattcttccctgccacctcccttcctcttcctcctcctttcttcttcttactttttcctcctcctcctcctacttcctgctcctcctcctcctttttcctcctccctctctttcttcacttccctccatccctcccttctccatctttctgaggttattactcctattattagttgggcagtgttatcaacccactatgacagcactcaacactcaacttacacatcccagagcttgtaatcctccttttgtaattttcccacaacttgtcatttccttgtaacagggctacagagcagctgggcctcccagcaaaagggtgagatttcctatggtgctttcatttcctccccatccatttagttcaaaagtgctggttgtgtttgtgttacaggttcatgtagctacactgctacactgacaccaccactactgcaaaatttcagattgaattaattttcttgttcaaacgggttttttctgacccatatttatgaaccagctttgtggtgttcttgatggtttcctttggtgtgttctgtaatctgaatttcttctctttggtgcctcattccatgcgctattcttggtagttttcatagtggaacactaggggaaaaaattatcccgaggaatatcatttactgtttatttagtgttgacaatgcgttaggcattatgctaaagattttatacattgcttcgtttaatcctatcaaaaattttaggtagttattatcccagtacacatggggaaactgaactttagtcaggttaagtgatttgtatgaggtctcatggccagtaagtggaacaacctagattcaaaatcagttcatatcattccaaagcccatagtcaaaaatgtagtttatggaatcttttaactcatcttttaaaaatgtaatgagtttttcaatagctctttcataccctactgcgagagtataaatgaatacaccctttctggagggcaatttagcaatacatataaaaagctttttaaaatattcttatcctttaatctaacaattcccatgcctgagtttatgctaaggaaataatcgttgatatgttcaaagattttaccctaaggaaattcaggatggccatattcataatatgaaaaatttgaaacaggttctatgcccaataaaagagaattggctaaataaagcatgatacataatcaatgaaataccaagtagtaattataaataatgtggaaaaagactatgtagtgacatagaaatgtgttcatgatataaacacatggtatggtatgataaataacataaatatatagtatggtaaataacatatacaacatatggtatggtaaataacataccataggatttcagattcaatcaatttttaaaaaatagatactacaaaataaactgaaagagaaatgatatcaaactaggacatgaatatgtaacatatatctaaaaatgtgaaaagctgtgagatgaagtaaggtgctggaattaagactaatttttattcttttatcttttttactatgtaataatttttagttgacatttacttttttttaactttttggttttggtttttggggttttttgtttgtttgtttgttttgttttgttttgtttttgaggcaaggtctcgctctgtcacccaggctggagtgcggtggtgaaatcacagctcactgcagccttgacctccccaggctcaagtgatcctcccacctcagcctcccaagtagctgggactacaggcgtgccccaccatgcccagcaattgtttgtattttttgtagagatggggtttcaccatgttgcccaggatggtggttatttttttaataggaaaattgtctgcatgttgtcccctttgctacccccagttttactgaggtataattcacaaataaaattatatatgtttaagatgtataatgtgatgatttgacatatgtaaatattgtgaaatgattactataatcaagctagttaacatatccatcacctcacctcagttaccttttttttgtatgtgtggtcacaacattaaagatctattatctttgccaatttcaagtgtacaatacagtattattaactacaaccaagatgctgtacattagagcaccagaatttattcatcttagagctgaaagtgtgtaccctttgaccaacatctctttggacttccatcttgggcatttcctctgttggtgtttttatgctaactccttggtcatttttttgcccaccaacctggtgggctgagcttgggagctaatcatttggcctggaaatattggcacaaaactgaacttttgtctggtgctgtgtgtccttgtgtggctccagtgggaaattcataacttgtttgagcaaagcaagctaactaactaaatgtcctttccacctccctctactagttttgtgaactccagcagcccttattttttcctctagagtttagtagctatctttctttaccctcactcacattgtgaaggaaatcctgtacttttttaaaaattacaagacctttgaccgatgttcgtatttatcagtgttcccattttatatttataatttcccccataaccaaataagcatttctgtagacacaacattctgtctcctcagtttctttaataactctttttttcttaatttgggttttcatttgtttttcttctcttttgactcagggtgttttgtttgatccagtgtcaggactaggccacttcccaactgccttgtgctgttgattcatattgatctcctaaactcatcacatcgcctccccttctttcaggcttcaagatgtccttgcagagtgccccattccttcttcagcttttctttctgctgtcatcactttgatcatctgcctgccagctttggcttccttcattgaccccctttcattcctcgcctataaagtccacctatcagtctctcatctatttttattcttcattgactgtttcaactgctagtcctgagtctaatcatttaagcctttgatttgggccttccctgaagcattttttcagatcttttaaaaaatgtctcaccactctgacttctcagagctctgcagagctttctgactgatgcttttttctttaggtcataattgattatagaaggaataattaacctcaggagataaaatactgaaacaacatcaattagcattccttctattaaaaaagtttagatgaaaagcaagtcgtctccataaagagcaaattatctgtagccaactcagagaaaaggatttatgacacagaatttccacctctcagaataaatgctgaggagatgatcagacaaatgttaaataagtacttgaaagtaagtaattgaaatgttatttgtagtagtaaaaacttaagaaatatcttaaatgcccaccagtacacaattggctatgtgaattttgactcatgcatactgtgaattactaggagtcattaaatattatgtttttgtgataatatgtatgtatttatgataacaaatatatattttgaataaaagttgcagaccagaatgtataatatgatcccatttctgtaaaaattgtatatgtatgtgtatatataatcactgaaataaggtctcttggtgatgggctttttgagggattttttattttttgtttctttttgtttcttcttcctacttttctacatcattcgtgtattttacagttaggaaatgttgttttttaggcaaataaaacaactactagtttcttagtgaattacatagctaacttcattttttgattgttcattttatatcttcctaacattttactatgaaattactcaaaaaatttttctttttattataaaattgtcattcatactagagataatatgttttatatatacatatatatgagaggatatatatatatatgggggataaagaataattataaaatggacacctgtattcccaaattcagcttaagaaaattaattctttgaaacttctttgtattcctaatcaaatctttcctgctctttcctccagagaagtaatcattcccaaatttgaatttcaaattccctctttttatagatttatgatatttacatattcagttcattatgctactacttgtgttactgtaatgcacattagttcataaacaataagtaaataagggaattgcgtcaatatacatggaagtcacattgcttatacatctttccccatacataaatgatctgtaccaccaaggaactgcagctgcctgcagggtacactaacacagctgaatacagcaagctgtgaatttctgtacatggaactcatccactgcaagttcttcctcttggctcgctttggccttctattcaatctgagaagtgcttattatatagttcttcctgatctttgggcattttatcctaaggtagcttcttcaacccttccttaaaccttctcctaagaaattatcttccttttttctatatgctgaattattgtatttgcagtggtgtttatttaatgtaaatggagaaagtagtatttattgattaagaatgtaatttgccttataattttcccagtgttttattaggatttttattgttttattaaattctggttacaaaattatagaggtttatttctcttttttctgtgtaaaaatagtccataatctgttacttttaatccttagttttgcagaatgtgagggtttaaaaaaacacatatattaccaaaaagaaaagactgatttcgtagaagtaaaaagtagaatagtggttactagagggtaggaaggatgcgggggtgggaggtgataaccagaagttggttaaggtatacaaaattacaactagataggaagagcaagttcaagtgctctacaggactataccgtgactataactaacaacatttattgtatactttcaaatagctagaagagcagttgttttttgtttttttgtttgtttgttttttgttttgtttttgagatgcagtttcgctctcattgcccaggctggagagcaatggtgcaatcttggctcaccacaacctccgcctccccagttcaagcgattctcctgcctcagcctcccaagtagctgggattacaggcatgagccatcacacctggctaattttttgtatttagtagagatggggtttcatcatgttagtcaggctggtctcaaactcctgaccccaggtgatccacctgccttgacctctcaaagtgctgggattacaggcatgagccactacacctggtcgaagagcagattttgaaagctcccaacacaaagaaatgataaagtattgaggtgatggatatgctaattaccctgatttgatcattacacattgtatacatgtattgaaatatcacacagtaccccataaaatgtataattatgtgtcaaataaaaatcataatgaaagcaaaataaatacacacatacatatattaccttataccagaaacagctgtttctggtatattaaacaatatattgtttaatgttgcattgttttgagttttgtacaaatggagtcatgctctttgcactttttcaattttttaaaaaatgtattatattcgtgagagtaatccatgttaatgactatcactgtagtttattcatttttactgctgtttagaatttcagtgtataagtgtgccaaaatttatttatctgttcttctgtcagtggagcagttggtatttgtggtttcctgctgttataaaaaatgttatcaatatttttgtatgattctttggcacatgtacaaaagtctctagggaattatacctaggagtaaaaaacatttatgcttattagacaatgcaaaatggatttccaaagtgattttacccatttaaacttgttcattagtgtaagagagagctcagctaagcacatccttgccaacagttgaatcattgccaaattgttgcggtttcaattcgattaccaatgagtatatgcttcttctctttgtccattcatatttttttctccatgtaatgcttgtgaatatcttttgcccattgcttttcttttttttttattttttttttttttattgatcattcttgggtgtttctcgcagagggggatttggcagggtcataggacaatagtggagggaaggtcagcagataaacaagtgaacaaaggtccctggttttcccaggcagaggaccctgcggccttccgcagtgtttgtgtccctgggtacttgagattagggagtggtgacgactcccaacgagcatgttgccttcaagcatctgtttaacaaagcacatcttgtaccgcccttaatccatttaaccctgagtggacacagcacatgcttcagagagcacagggttgggggtaaggtcatagatcaacaggatcccaaggcagaagaacctttcccagtacagaacaaaatgaaaagtctcccatgtctacctctctccacacagacacagcaaccatccgatttctcaatcttttccccacctttcccccttttctattccacaaaactgccattgtcatcatggcctgctctcaatgagctgttgggtacacctcccagacggggtggtggctgggcagaggggctcctcacttcccagtaggggcagccgggcagaggcactcctcacctcccagacagggcggctggccgggcgggggcgaccccccacctccctcccggacggggcggctggccaggcgggggctgacccccacctccctcccggacggggcggctggcttggtggagacgctcctcacttcccagacggggtggctgccgggcggagggtctcctcacttctcagacggggcagcggggcagaggtgctccccacatctcagacgatgggcggccgggcagagacgctcctcacttcctagatgggatggcggccgggaagaggcgctcctcacttcctagatgggatggcggccgggcagagacgctcctcactttccagactgggcagccaggcagaggggctcctcacatcccagatgatgggcagccaggcagagacgctcctcacttcccagatggggtggcagccgggcagaggctgcaatctcggcactttgggaggccaaggcaggcggctgggaggtggaggttgtagcgagccgagatcacgccactgcactccagcctgggcaccattgagcactgagtgaaccagactccgtctgcaatcccggcacctcgggaggccaaggctggcagatcactcgcagctaggagctggagaccagcccggccaacacagcgaaaccccgtctccaccaaaaaatccgaaaaccagtcaggcgtggtggcgcgcgcctgcaatggcaggcactgggcaggctgaggcaggagaatcaggcagggaggttgcagtgagccgagatggcagcagtacagtccagcttcggctcagcatcagagggagaccgtggaaagagagggagagggagaccgtggaaagagagggagagggagaccatggggagagggagagggagaccgtggggagagggagagggagagggagagaggcccattgtttttcaagtgggaggtttctatttttctttcaataggaatgctatatattctggatactaatcttttgcatttacattgctgtaactatcatcttccaatttgtggcttatttcacttttaggttgtttttatgaacagtgcttcttaatttaatgtaattgaatttatcattttttctttcaccttttgtggtttttttgctaagaaacctttcttaagaatagttataaagacattctcctataatttcttctaaattcttaaaagtttttcctatcacatttaaatcttcaaggcatttgcaattgatttttgtgtatgatttgagtacagattcaaattaattttttccacatggataaccagttgcctcaatactgttatagaatagtctgccctttctcctaccaatacacagtaccatctgtcaattatcaaggtcccgggtatgcatgagtctgcttctgagctctgttctgtactgtttgtcttccctgccattatcaactatctcaattattccagccaagtattaaactttgggagcagatagggtgagcctcccttctgtgttctttttcttctgaggtattgactgtttccagctctttgcttgtccacataacttataagaatcaactagccaagttgtgcatttgcgacacacacatacacctattgagattttttattagaactgcggtgaatttggacagagctgacattccaacaatattgagccttcctatctgtatgaacacaggagagacagtcatgggttgctttacaatggggatatgttctgaaaaatgcgttgttaggtgatttcattattgttcgaacatcacagagtacacctacccaaacctagatggtatagcctacttacacctagctatatgggtatagccaattgctcctaggctacaaacctgtacagcatgtgcctgtattgaattcttgtgggcagttgtaacacagtgataactatttgtctgtctaaacatatagaaacatagaaaaggtacagtaaaaaatggtataaaaggccaaaaaaagggtacatgtgtataataaggtacttaccatgaatgggacttgcaggactggaaattgctctgggtgagtcagtgagcgagtgatgagtgaatgtgaaggcctaggactcactgtgcactactgtagactttataaacactgtacacttaggctatactaaatttatctttaaaaataaagtaattgtactatgatgttgggataggtaagatgtcactatgtgataggaattttttagctccatcataattttatgggaccaccatggtatatgcagtttgtagtgtatgactatatttagattttctttaatgtctttcagcatttgaatttttctccataaagttcttatacatctttagtttattttccgttttttcattttttttaattgatgaataatagacatacatagtttgtggatacctgtgataatttaatacattcatgtatcttgtacagatgaaatcagtgtacttgggatatccatcaccttaaatacttgtcattttttaggctaggaccattccaattcttctcttctagctattttgaaatatacaatagattattgtaaactaaagtcaccctgctgatctatctaaacactgtcttatttattttatcaaaccttgtatttgtacccattaatcaagttctcttcatcccccaagcctctggtgaccactagtctcctctctgttttcatgagatccactttttagcccccatatgtaaatgagaacatgcgatatttgtctttctatgcttggcttattttacttactataatgatctctagttccatccacgttacaataaatgacaggacttcattcttttttatggttgaataatattccattgcggacaggccccatattttcttaatttattcatccgttgatgggcacttcaggttgattccatattttggctattgtgagcagtgctgcaataaacataggagtgcaaatatcttcttgatatattgacttttttagatatctgtccagtagtggaattgttagatcatatggtagttctatttttcattttttgaggaacctccaagctattctccatagtggctgtactaatttacatcctcaccaacagtgtatgaaggttcccctttctcctcattctcactaacatttattattgcctgtcttttttataaaaaccgatttaactgggctaagataatatcatgttatagtatgatttgcatgtctctgatgatacatgatgttgagtattttttcatatacttgtcaaccatttgtatgtcttcttttgagaaatgtctattcagatcttttgcccattttttaattgcattattcatttttttgctattgagttgttttgagttctttatatattctggttattaatcccttgtcagatgggcagtttgtatgtattttctcccattctgtgggttgtctgtccactttgttgattgtttcttttgctgtaaagaagctttttagtttgatgtaatcccatttttctatttttcctttttgttatttgtgcttatgaagtcttacccaaaaaaatccttgcccagaccaatgtcccgaagcatttcctgagtgctttcttctgttaatttcatagtttcgggtcttatatttttaaatcaattttgacttgattttggtgtatggtgagagacaggagtctagtttcattcttctgcatatgggaagttaccagttttcccagcaccacttattgaagagactatgatttccccattgtatgtttgtggcacctttatcaaagctgacttggctgtaaatgcatggatttctatctgggttctctcttctgttccattgttctacatgtctgtttttttatgccattatgctgattttgttactatagctttgtagtaaattttaaagtcaagtagtgtgatgcctctggctttgttctttgctctgtggctattcagggtcttttgtagttccttgtaaattttaggattttattttctatttctgtgaagaatgtcattggtcctttgatagggattgcattgaatctgtaagttgctttgggtactattgtcactttaacaataacaattcttctaatccatgagcatggaatagcttttcattttttgtgtgtgtcctcttcaatttcttttatcagtgttttatagctttccttatatagatttttcacttatttgattaaatttattcctagatattttatattctttgtagctattataaataggatttttttatgatttctttttcagattgttcactggtggtgtatataaatgttactgatttttgagtgttgatttttgtatcctgcagctttactgaattcatttgtcagttctaatagttttttggtggagtctttaggtttttctcattataagatcatgttgtctgtagataaggctaatttgacttcttcctttcctatttggatgttctttatttctttcttttgcctaattattctagccaaggacttccagtgctgcattgaataaaagtggtataaatagtcatccttgttttcttccatattgtaaaggaaagtcctttaatttttctccattcactatgatgttaggtgtggctttgtcatgtatggtctttattgttttagaggtatgatccttctatgcccagtttgatgagggtttttttttttatcataaagatacgttgaattttatcaaatgccctttaaatatctattaaaatcatacagtttttgttgttggttctgttaatgtgatgtttcatggttattgatttgagtatgtggaaccatccttgcatccctgggatgaatcctacttaatcatggtgaatgatttttttaatgtgttgttgcattcattgtgctagtattttgttgagaatttttacatctatgtctatcaggaatagtggcctgtaagttttctttttttgctgtgtcctcatctggttttggtatcaggataacgctgacctcgaacaatgagtttgtaagtattctctcttctttaatttttttgaagtgtttgggtagagttggtattaattcttctttaaacatttgatggaattcatcagtgaagcatcaggtcctgggcttttctttgatgagagacttttattatggcttctatttcattactcaatattggtttattgaggttttgcatttcctcatgtttcaaccttcgtagattgtatgtgtccaggaatttatccatttcttctagattttccagtttgttggcacaatagtcatagcagtctctaatgattctttgtaattcttcagtctcaattgttgtttcctttttttgcttctgatagtatttagttggggcttctctttttttcttatttactctagtcaaaagtttgtgaattttgtttatcttttcaaaaaaacaatttttcattttgtcgacccatttttttaagtctcaatttcatttatatctgctctaattttattatttctttccattaatttggggtttggtttgttcttgcttttgtagttccgtgaggtgcatattagcaaatattaatagctctaaagggagagatagactgcaatacaatggtattgtattgcaaagtcccctacaacaagtagaggactttaacacctcatgctcagtaatgggcagatcagacagaaaatcaacaggaaaacatcagagttaaactacacaacacacctaataggcctaactgacatttatagaacatttcacccaactgctgtagaatacacattattttcatcagcacatgaaacattctccaaatagaccatatcttaggccacaaaacaagtccaaacacattttttaaaaaatagaaattatatcaagtatcttttctgactactatgaaataaaactagaaatcaatgagaagaggaacttcggaaacttcacaaacacatggaaattaaacactatgtttctgaacaccaatgagtcaatgaagaaattaagaaggacattttaaaatgtcttgaaatgaatgaaaatggaaatgcaacgtactaaaatctatgggatacaacaaaagcagtactaagaaggaggttcatagcaataaagatgcttatatcaaaaaagtagaaagacttcaatggttcattttatttttcagaaaattacttttcgttactgttgtaagtagcaactacttgtaataaacttcattcctaagaataaacttctttgctgagaaggaagtaaataaacttccttcctgaaaaggaagttcatagcattaactctgttgtttccctgttgattttctctgtgaatgattggtccgttactgagagtgggtgtgaaagtcccctactattactgtattgcagtctatctctccctttaggtctaataataacaaaatgtgttattattatagcaaaagtagtactaagaagggagttcatagcaataaatgaatatctcaaaaaagtggaaaaacttgaatagttcatgttatttttgagaaactttttattttaagtagtatctacttacaaagtatatatttcacttatcaattattaatggaaatacaaatgattcttttatactttatatcaagcaactttgctaaattctctctttgttttttctttagacgggtctcaccatgctgcttaagctgggctcaagtgattctcccaccttagcctcttgagcagctaggaatacagtcaccacacccagcctaaattttcttattaattctaattatttgtatgtagatgttaagattatcatgttttctgtaattaatgatcttttttttctaaaccttacatgcttgatatatttttgttatactactaagctggctgaaacctctgggaaaatgataaagagaagtgatgatggggcatccttgtcttgctcttgatttttaaaggaaagacttttaagatttttgtcagtaaatgtggtattgggcatagatttttttaatgatcactgtttattacattaatgatatttccttcaactcccagcttgctaaggtcttcccttgaaaggatgttgaattttatcaattttatctttctccccatgggagcagacatctgagactaatgagttggcctctggagacctggaatgtgtggaaagcatgtctggcttctttccctccagcactgaatggctacgtattttggaacatgccttcctcatactgattagaaagagtgaacctgaagtttagccttggagaaaaaggaaagagtgcacgccttagatgtagattatttaggctaacgtagtggaggaaaaagatcttttgtgtagttcactctcagtcactagagttcgacattggggcttggggatctcagctaatattctcagtatataccatttcccctgaaaccttgagggcaggatttctaagtccccagccaaaaaccacctcctaatgcagtagtacttaaactcaagtgtgtatcagagtcacacattgttgggctccaccccagagtttacgtgactcagtaggtctgaaaatttgcctttctaagaagtttccagttgatgctgatgctgctggtcctagagtccacactttgaagaacactgccctaaagcagtctctctgaaacatcctcacactaaaaaaaagcccaggaccagaaggatttacagctgaattctaccagaggtacaaagaggagctggtaccatttcttctgaaactattccaaacaattgaaaaggagggatgtgttagtccgttttcacactgctgataaagatgggcaatttacaaaagaaagaggtttaattggacttacagttccatgtggctggggaagcctcacaatcatggcaaaaggcaaggaggagcaggtcgcatcttatgtggatggtgtcagacaaagagagcttgtgcaggaaaattttgccttatgaagccatcgtatctcatgagacttattcactgtcacaagaatagcatgggaaagacctgcccccatgattcaattatctcccacaaggtccctcccacaacacgtgggaactatgggagtacaattcaagatgagatttgggtggggacacagagccaaaccatatcaagggacttctccctaactcattttatgaggccaacatcatcctgataccaaaacctggcagagatacaacaaaaaaagaaaacttcagtccaatatccctgatgaacatcaatacaaaaattaataaaatactggcaaaccgaagccagcagcacatcaaaaagcttatccaccataatcaagtgggcttcatccccaggatgcaaggctggttcaaattacacaaataaatcaatgtaattcatcatataaacagaactaaagacaaaaaccacatgattatctcaatagacacataaaaggcctttgataaaattcaatatcccttcatgttaaaaactctcgataaactaggtattgatggaacatacctcaaaagaataagagctatttatggcaaacccacagccaatatcatactgaatgggcagaagttggaaacattccccttgaaaattggcacaagacaaggatgccatttctcatcactcctatttaacatagcattggaagttctggccagggcaatcaggcaagagaaagaaataaaatcatccaaataggaagagaggaagtcaaactgtttctgtttgcagatgacatgatcctatatctagaaaaccccattgtcccatcccaaaagctgcttaagctgataagcaacttcagcaaagtctcaggatacaaaaatcaatatgtaaaaatcacagacatttctatacaccggcaatatacaagcagagaaccaaatcatgaatgaactcccattaacaattgctacaagcagaataaaatacctaggaatatagctaacaagggaagtgaaggacctcttcaaggagaactacaaaccactgctcaaggaaatcagagaggacaaaaacaaatataaaaacattccatgctcatgaataggaagaaccaatatcatgaaaatggccttactgcacaaagtaatgtgtagattcaatgctattcccattaaactattgacattcttcacagaattagaaaaaaccactttaaaatttatatggagccaaaaaaaagagcccatatagccaaaataatcctaagcaaaaagaacaaagctggaggcatcatgctacccaacttcaaactgtgctacaagtctacagtagccaaaacaggagggtattggtacaaaaacagacacgtagaccaatggaacagaatagtgtactcagaaataagactgcacatctatgaccatcagatctttgacaaatgtgacaagaacaagcaatggggaaaggattctctgtttaataaatggtgttgggagaatgggctagccatatgcagaaagttgaaactggatcctttccttacaccttatacaaaaattaactcaagatgaattaaatacttaaatttaaaacctaaaactatcaaaaccctagaggaaaatctaggcaataccattcaggacataggcacgggcaaagatttcatgacaaaaatgtcaaaagcaattgcaacacaagcaaaaactgacaaatgggatctaattaaactaaagagcttctgcacagcaaaagaaactatcgtcagagtgaacagacaacttacagaatgggagaaaacttttgcaatctatccatctgacaaaggcctgatatccagaatctacaaggaacttaaacaaatttacaagaaaaaaacaaccccattaaaaagtaggcaaaggggccaggcacaggggctcacacatgtaatcccaacatgttgggaggccaaggcaggtggatcacttgaggccaagagttcaataccagtctggccagcatggcaaaaccctgtctctactaaaaataaaaaaactagctgggcgtggtggcacacccctgtagtcccagctgctcaggaggctgagacacaagaagtgcctgagcctgggaggtggaggttgcagtaagcctagatcgtgccactgccctccagcctgggtaacagagtgagaccttgtcctctgccaccaaaaaataaaaataaataaaaataaagtgggcaaaggacgtgaacagacacttctcaaaagaaaacatttatgcggccaataaacatgaaaaaaagttcaacatcactgatcattagagaaacacgaaaccaacccacaatgagatattatctcatgccagtcggaatggtgattattaaaaagtaaagaaacaacagatgctgatgaggctgtggagaaataggaatgcttttacattgttagtgtaatgcaaattagttcaaccattgtggaagacagtgtggcatccctcaaagacctagaacgataaatagcatttgacccagcaatcccattactgagtatatacccaaaggaatataaatcattctattataaacatacatggacacttatgttcattgcagcaccgtgcacaataacaaagacatagaaccaacccaaatgcccatcaatgttagactagataaagaaaatgtggtacatatacaccatggaatattatgcacccataaaaagaaaccagatcatgtcctttgcagggacatggatggagctggaagccattatcctcagcaaactaactcaggaacagaaacccaaacacggtatgttctcacttataagtgggagctgaacgatgagaacacatggacacagggagaggaataacacacactggggcctgtggaagttggggtcagggagcacatcaggataaatagctaatgcatgctgggcttaatacctaggtgatgggttgataggtgcagcaaaccaccacggcacatgtttacctgtgtaacaaacctgcacatcctgcacatgtataccggaacttaaaataaaattaaataatttttttaaaaaaagaaatcaatgagaattatatccctaggaagagttttgattccagattttctacaatttttttttttttttgagacagagtttccctcttgttgcccaggctgaagtgtaatggcgcgatctcggctcaccacaacctccgcttcccaagttcaagcaattctcctgcctcagcttcccgagtagctgggattacaggcatgtgccaccatgcgtggctaatttttgtatttttagtagagacggggtttctccatgttggtcaggctggtctcaaactcctgacctcaggtgatccgcttgcctcggcctcccaaagtgctagaattacaggcatgagccacagtgcctggccgattttctacaatttttaagcaagttacttcattgttctgggatgcatttactcttgtgagactcaaggtaaaattacctaagcgcccagaaagcaaggtacaatatagttcaagatagttcttagaattgcagattcttctagtgggacatgcagatctcacgtccacacatacccagggccagatgccctcttggcctccctcagagatgatcattcagcctctttttgaatgcttttacaccatcacatgtatttccattgttgcacagtcctcattgttggaagaaggacatttttctcgtgctcttttgaaaacctagtgcattattgtgcagatctcatggttagaaaattcttccttacatcacatcaaaatctgtctccctttaatttgtgcctgcagccgtattgtccgtacccacccaggaaaacactaagacctctttcagcatcctgcagaccccaatcatgtcctgactagagttctccaggcaaactctcagagttagttcccataattgtttcctctttatggcttcattaccaagctttcattgtccagcttggacaaacactggctcgtttgggtcctctctctaagactgaaatatacatacttggcaccataccccatatgaattctgggccaaggctgagtatgatacgtctcttggtcctcctggtccttgttaataacccactttagtagttacctggaccctgtggctcatatattgcctatatataatccagactcttctatagttttgcttactatttgggtacaattactaagccagtgtcaaaaaacctagctgaattactgaaatcaacatcgtttcagtgaccatggcaaagagaaggcaaggatgatctgagatgacttactcatactggctcctgactattgcagctgtggttgctgagagggacagccctccacctgagaataggtttctcatttcttccacatgattgtctcttctaaccaggatctgccattgttctggacccatatcagtgtcttgtctgcccatgtttagctcctcaacacttgaccccgtgtcatgtcctcttcctgaaaactccaaggtgactgctgaaagtgcctgggtttttgttgttgttgcttactatctctttgtctctttgtcctgctaatctctgtgccagatcctgtcattggctcttttaggtttgttgattctactttatggccctgatttctttttttctacatacagtatccgtttgaagattctttaatggagcgtatccatttttctcattaaagactttaatttatgctgtcttgtaaaggaaaaacaaagggcattcttcagaacttcttttaaaatatgccacagtggctatatagtatctcaaggtggcgggggtggggggcagtatagacaaacaattgcagagctgaagaggacccagtcctcctaatccgcagtccagaaccattgaactaactctatgcagactatctcttctatggctcagacaggataatgaagggatgacattgttgttctcttagttcagaaggcgtaaacctcagtgaggaggtgggatggatacagaagcaggcagatcactgagatcatttaatgccacattctgaacatatctaagtcccaactctgatccaacagggaaagatgtactactattcaggtaaactcaattgtcattcattttgtacataaactgtataggtacactttacatcctagactctaatggctagaatttaaccaaataaaatctctcctggctgctaaggagtccttggactgaaagtgactaaaaaaagaccatgtcccctaactggacacgtggcagcagggtagtaaggcaaattccttgtttgaaagcattcatagcacagtattttttcattgactggacaaagggtcacacgaaagcccatgataaatgacttgcttttcttcagtcatttattaaccacagaagtgtggaatgcatcactgagagactaatccatgccacacattcaagggacttaaagcagagttttccagactgctaaggaagcaggtagaagaaggaaggaggtaggtctatccttgcttttgctgccatctcgaacataactgcctctagcatcttgaataacagacggagaaagtctttgcctatgcacttgagaaagctgggccataccatgattacggccctctgcctccatgggtgaactaagggcacagctggacagctgggctttgtatgaggcaaacaatctgctgatttattttaaaccatcatgctggtatgtgcacgaccaaatgaatgtggtccccttttaagtaaagccccttgaaaagctttctgcttatcccatgatgcttccacgtcgctcaagagattcttagggagttgagtgcaggaatgcacaaaaaaagatgacagccatctatctacatccacaactcataattagctactgtaaatattttggcctatttgcttccaacgtttttctttatttaagaaacctctttctattgtttcttattaaagtgaagcacagattattacggagatctcaaatcatgcagaaaagaacacaaatttaaaggtttttttaaaagcacctgaaagttcatcattaatatttggtgaacattattcagggtaggtttctatatatcccactttttggaatatcatcagttttgtcaaagtttccaccttggaaaaaggatttgatttttcaaaataggtcagagttgccaggagccattgaagtccagtgaataaggtaatgattaagccgtgtgacaagattttggtgccaagtcaggtataattggttttcttggacagctcagaaattgccatgagaggcacccatgtcagaagtgaccaacaagacctgccctcagagagactgtatctgaaggacaggtgcatgaggttgcagaagtgttggggatcataaccactagaactgagccaaggctgtttcttgagggctgtggacctcagttaggtccttaccctcacagagcctgtgtttgctcatctttaatggggtgttcataatgtccacttttcacaagctgttatgagactcaaattaggtcagggacatgaaagctcttttgcaaatgattaagccctatacaaatgttaggcattactgcttaagtatatttgtcaaattaatcttgtttcttgatgggtacacctcctacagacagtcagttcacagacagccacatcatcaaatcctaactgggtgagggcttttctttccccttgtactctccttgggctgcacgtttgtcccttcagggctaccttgtccttgatgtgatgtccattttacctgacttttccagtacttgatcatgggcaagggaaatcatagaaggcaggcaggacacagtttgaatcactaccaccattgtttttagcttcctgcaacctgtgtggcaaatgacttcagtctggggtgtctatggaattttagaaggatctggtcagtttccttagttacctggaagttcttttgacatttaacttatcaactcatttttcaccaaacagaggaatctgagatctggaaggtttctcagagttcttatgctgcataaatagggaataaggacaaaaaactatagttatctgtacaaacgagagtaataactataccattctaatagtggttgaaaggactaaacttcaggtatttagtatagccgggcacataaaagtgctcattaaatgttagctattattttgggtgttattattattaatacaaggactagaacttctaggctctgtaagttagaaaggtagtagcttatatgtcatgagtgacttttgacacatgaaagagtgcctcatcaacagtgagatactgttaatcatgcataatttacaaatgtaattttgccatttggaatgtctactttttgatttgtatccattcattcaacatatatttattgagtgcttactatatgccaggcattgtgctgtgcattgaacatacagtggtgaactacacagacctcatccacgtggagctgactgtctaacaaaggagacaaacagtaaacaaataactatagcaatgaatatttgtctagaacttgttttgagtgcagtgaagggaaagtaaaatttttttttttttttgagacaaggtctggctctgtcacccatgcaggagtgcagcgacatgatctcagctcactgcaacctccatctcccgggctcaagccatcttcccactcctgagtagctgggactacaggcacatgccaccatgcccggttaatttttttgtagttttttgtagagacagggtctttctttgttgcccaggctggttcaaactcttgagttcaagcaatctgcctgcctcggcctcccacggtgctgggattacaggtgtgagccaccacgcctggccaggaaaatacaattctatgaggtatgtagctgatggtacccaatcttgtgtgatagatgggaaaggggcaaggaagattcaggatgtttccctaaagtaattgacgtgtgagttgaaatccaatgaacgagtaggaataatgtaacaatgagtgagaagaagcagattcccaagagaaggaacatgtgcaaaggccttgaggctggattttgacattcagcttatcagctcatcttacaccaaacagagaaatctgagatctggaaggtttctcagaagttctcatgctgcacaaaaagggaagaaggactaaaaactatagttatctgtacaaatgaaagtaataaccgtaccattctgatagtggttgaaaggacaaaatttcaggtacttagcatagcctgccacagaaaaaaaaatgttcaataaatgttagctattatttttggtgttattaatacaaggactagaatttctaggctctatacgttagaaagatattggcataggcatagtcacatctaagcagagtgagggggtgtggagcagaaaatgaggttgggggttgtaggagactaaacaaggcaggcatggtctcattgcagaccctgttaagaattgtgctcttgactctaacagcaaagggagtccattgaagtgattcaaacaagatgaacaggtttctgtattcaaagatcctgccactgcaagcagaataatggattggaggggggcccaagtggatgcaggtagttaagtgtaggaggctgtaacagcaggctgtgggagagttgatggtagcttaacacagggccatagtggtagagctgaaaagaatcaaaaattatttacgggccaagcatggtagctcacacctgtaatcccagcactttgggaggctgaggcgggcggatcatgaggtcaggagatcaagaccagcctggccaacatggtgaaaccccgcctctactaaaatacaaaaaattagccaggcggtgtggcaggagcctgtagtcccagctactcgggaggctgaggcaggagaatcgcttgaaccagggaggcagaggttgcagtgagccgagatcatgccactgcactccagcgacagagttctggcaacagagcgagactctgtctcaaaaaaaaaaaaaaaaaaagttatttacaaggtaaaatccacaagatctggtggtgaactggataaaggaggtagaagaagaagaagatgaggagaatccatttattcattcagcaagtatttattgagccccagatgctctgctaggtactgaggattaaactgtgaacaaaacagaaaagtctctgccctcaataggttacagtttggaggggattggaactgaagagttgacaatatgcaagtaaacaaatagtgatgtgtttgcattgcaaattataattacatattacagtgtgggtgattacagataagtactacaacaaaaaaataagggacatgtcagagagagtaactcaggaggaggtgacatttaaggtaagacctaaaggatgagaaagacagccaagagagccagtgaaagagcattctgggtagaggaaacagtaagttcaaagatcttgatgtattccaggaataggtgggaaattagggtggccggaaatagtgagcaaggaggaattgtataaaatggggtggtaggtcatttgtaggtcatactgaagattttggatttttttaaatacagcagctagaataacctgactgatgtttaaaagattactctgttgtgtgaaaaatggggaaaaattaattatttcacaccaagagtaaaagcagggagaacagttagaagccagtcattcaggtgatagaggatgataacttgcactgggactgtgatggtggatcagggaaagagaaacagatatcagagggattttaacaaactggcctcactgaagatccaaatgacccctaaagaagtggtggcatgattccgttgcataagttgacagcctggtgtaacctacctatgattcatctcaccagacccagcccagatcagggttcagggaccaaacccagcaccagagtagctgggatcagggccaggggtcatcaagactggggtcaccaaagtcacatcagggtctgtagcagctcacagtgaagggaggaatctgttgagctgggtttctatcagtgctgtttgcctggggctagaagtggtaaccagttcagaacctgggtgagggtagagctgggtcaacactggaggttaaagtggcaaagctgccagttcaaggttacagggatggagatatgccacctatgacaccattggatgagacatttggtggatgagtcagacattggagatttatttgtggaataccaagcagtgcaatctcagtgttctctagctccttgtgatttagacaagagggatccctgccttgcagatttagtttgatctagagtgtgaggctttttggtagccttaccagtaagatacttgccttcttgatcttgtctatttctctgccatttcaacattattttccacatgaggtaaaatattcaggattctgtgacaagtttcagctcagttgctgctgtgtgggtatgcctgcatgcacatatatgtaagcacatgttgtgtctactgcgatgagcgtgtgtggcagctggagtgtcagtaatggtacattagggcatgttaacctgcagggccacaagcatctccattttttaaaaagagagaagagaagagacacctgatcccaagatagagacaacaaagaaggatgatccattctggtgtcagttacaaaaaacagcagcatacctcttcctgaaacttgtttgtgtctgaccacttcatcctgctcttcctccagtctcaatccccagccaatgctgatttctacccaacaacacctagaagaatttggcaatttatcccaacaataagcgaagagccagtgatatgtctgagagtactaattatttccaaatattgggaatccagctttacacagactgaaaatttctgaagaaatacagagcaacatctctgttgctgtatgtcattaccagcatccttgataacagtttaccacaatgcattaaataaatcatagaacaccaaggatttacagctttttgagcttgatatccagaagaagagaagacagagttaagaaaagtaacgatattatttttgtcttctaaactctctgctttggttgctgggtcctcttcttggtgattcaacaacgtacattaaaatattaaggactttgtgctgggcatggtggcttacacctgtaattccagcactttgcgaggccgaggtggatggatcacatgaggtcaggagtttgaaaccagcctggccaacatggtgaaaccccgtctctactaaaaatacaaaaattagctggctgtggtggcaggcacctgtaatcccagctacttgagaggctgaggcaggaaaatcacttgaacccaggaagcagaggttgcaatgagccgagatcgcgccactgcactccagcctgggcgacagagaaaaccccatctcaaagaaaaacgactttgataaatgtttgtttatgtctgaccacttcatcttgccttcctccagtctcaattcccagccaatgctaatttctacccaacaacacctaaaagttggcagtttatcccaacaataagccaggagccagtgatatgtctgatagtactaattatttccaaatattgggaatccagcatgaggcagagtgtagaaagagacattgagttttatttaactgaatttttccatatatttttgatcaagaacactttgggaaatgctactttaagattaccattcattttcttttcccctcacccccttccttggagaaccatcaatgctcacagttccagctgccatcttagtgctaaagtctctcttgtctcagcgcaagcccctctctaccccagctctaggacacccctgcccatagcacaccttcacctagatggctcacagtggggcagagtaggaatctacagaggttcagaggaagttctgaattcattaattcttcattcaacaaatatgaaaaaatgaaactgatggaatggaagaggctctacttctgcaatttttattaaaccaccttgagaactgaaccccaaactcagtgaatctttggttcctaaaggtgtagaatctttactgatctattgccactagaaagatagtaacaacaacaacacaaatctctagtacaccagtgaacaatgaaatcccagtacacctgggaataatgcaatctaggtttaaataatccccccatcatttattacagcatgacttggacaagttgcttcacctctctgagtctcacaaagttcatcttgtgagtagcgatagtatctgtggcaattattgggaagatttaatgaacaagtatggcaaatgtataataccttttacctattgctcacctccctcttatttctccatttaactcccatcctctcccatttctttttatatccattaagctagcacagtctccataaaaacaactgaatctacacatctattcaaagccttcctgccctagcatattgactataattctacccaaaagagagaactggctgacagctttctgccaatattggagtaggctgatctttttctggaatagcctctaaaagacaatagcattattttttagtagattctacaaaacaagataaaggggactggaagaggccctttgcccttgggagggtccattcctagctgggggtaaaggtaattatctctgacttttggtcttctcatctgctaaataagtcctgagatatccaccacttttaatagcctgtgtactctgggtgtatgcatagagtgcctagcagcttgcctatacctcttcatccatgaaagattcaagaagagggaggatatccgttgagcacactactgcatcatttattagagaaaaaaaaattcctatttgggggttactagtcttatatcacatacaacagactttaaaccaacaacaatctaaaaggtcaataataataataatcctttcttagtagtagtaataataaaggattcaattcaacaagaagtcttaatggagcacccagattcataaaacaagttcttagagatctatgaagagatttagataaccacacgataatagtgggagactccaacaccccactgacaggattagacagatcatcaaggcagtatctaacaaagatattctggacgtaaactcaacacttgaccaattggacctaatagacatctacagaacactacacccaaaaacaacagaatatacattcttctcatctgcacatggcacatactctaaatcaaccacatgcttgcccataaagcaagtctcaacaaattaaaaaaaaaatagaaatcatgccaaccacactattggaccacagagcaataaaaatagaaatcaataccaagaagatctgtcaaaaccatacaattacatggtagtttaacaacctgctcctgaatgacttttgagtaaacaatgaaattaaggcagacatcaaaaaattctttgaaactaataagaccagatatacaacataccagaatctttgggacacaactaaagcagtgttaagaggaaagtttagagtgctaaatgcctacatcaagaagttagaaatatcttaaattaacaacctaacatcacaccaagaagaactagaaaaacaataggaaaccaaccccaaagctagcagaagaaagaaataaccaaagtcatagctgaacttgatgaaattgagatgcgaaaatccagacaaaagctggttcttcaaaaaattaagtgagatggataggccactagctagattaataaagaaaaaagagaagatccaaataaacacaattggaaatgacaaaagtgacattacaaccaaccgcacagacatacaaaaaatccttagcgaatattatcaaaacctctatgcacacaaactagaaaacctagaagaaatggataaaatcctggaaatccaagcctctcaagattgaaacaggaaaaaattgaaaccttgaacagaccaataatgagctccaaaactgtatcagtaagaaaaagccaaccaaccaataaaagcccagagccagatggattcacagccaaattctaccacatgtaaaattattccaatcctactgaaattattccaaaaaattgaggaggaggagattccaccctaactcattctatgaacccagcatcattctgacaccacaacctggcaaagacacaaccaaaaaagaaaacttcagacaatattcctgatgaacatcgatgcaaaaatcttcaacaaaatactaacaaacctaatccagcagcacatcaaaaagttaacccaccacaatcaaataggctttattcctggatgcaaagttggttcaacatacgcaaatcaataaatgcaatttcccacataaacagaattaaaaatgaaaactgcataattatctcaatagatgcagaaaagacttttgataaaattcaacagcccttcatattaaaaaaccctcaccaaattagacatcaaaggaacatacttcaaaatagtaagagccatctgtgacaaacccacagccaacatcatactgaatgggcaaaagctgtaagcattttctcttgagaactggaacaagacaaggatgtccactctcaccactcctattcagcataatactggaaatcctagccagtgcaatcaggcaagagaaagaaataaaaggcatctaaataggaagaaaggaagtcaaggtttctctcttcacaaacaatatgattctatacctagaaacccccaaagactctgcaaaaaggctcagagaactggtaaacaactttagtaaagttttaggatacaaaatcaatgtacaaaattcagtagcattactatataccaataacatttaaactgagagccaaatgaagaacacaattccacgtacaatagccgcaaaaagaagaaaatgcctaggaatacagctaaccaaggaggtaaaagttctcaacaacaaaaattacaaaatactgctgaaagaaatcagagaagacacaaacaaatggagaaacattccgtgctcatggacaggaagcatcaatatcattaaaatgtccacactgcacaaagcaatttacagagttaatgctattcctatcaaaccaccaccattatttctcacagaaccaaaaaagactattctaaaattcacgtagaaccaaaaaagaccctgaatagccaaaataatcctaagcaaaaagaacaaagctggaggcatcacactccctgacttcaaactatactaaaggctacagtaaccaaaacatcattgtgctggtacaaaaacagacacatagaccaatggaacaggatagagaacctagacgtaaagccacacacctccaaccacctgacctttgacaaaatcaacaataccaagcagtggggaaaggactccccatatgatcatctcagaatcatttactattcagtaaatggtgctgggttaactggctcgcataggcagaagattgaaactggatcccttcctttcaccatatacaaaaattatctcaagttggattaaagacttaaatataagacctaaaactataaaaatgttagtagaaaacctaggaaataacattctggacatcagccttgggaaagaatttatgactaagtccccaaaagcaattgcaacaaaaacaaaaattgatgagagagacctaattaagggaagagctgctttctgcacagcaaacaaaactatcaacagagtaaacagacaacctacagaataggacaaaatattcacaaactacccatccaacaaaggtctaatatccagaatttgtaaggaacttaaacaattgaacaggaaaaaaaaagaaaaaaaaacatttaaaaaggacatgaacagacatttctctaaagaagacatacatgtggccaaatgtatggaaaaatgttcatcaccactaatcattagggaaatgcaaatcaaaaccacaataagataccatctcacaccaatcagaatggctattactaaaaagtccaaaaaaaaaaaaaaaaaaacagatgttggggagtttgcagagaaaagggaacacttatgcgctgttggtgagaatgtaaattaatttagccaccgtggaaagtggtgtggagtttcctcaaacaacttaaaatagaactatcatttgacccagcaatcccactactgggtatacacccaaaagaaaataaatcattctaccaaaaggacatatgcactcatatgttcattgcagcagtattcacaagagcaaagacatggagtcaaccaagatgcccatcagtggtggactggataaagaaaatgtggtacatatatgctacagaatactatgcagccataaaaaggaacaaaatcatatcctttgcagcaacatggatgcagctagaggcctttatcctaagcaaactaatgcagaaacagaaaaccaaatacttcatgttctcactgataagcaggagctaaacattgaattcacatgggcacaaagatgggaacaaaagccacttgggcctacattaacggggaagatgggggggtagtgtgtctggaattggtgggctcttggtctcactgaccaagaatgaagccacggaccctcacggtgagtgttacagttcttaaagccggcgtgtctggagtttgttccttctgatgttcggatgtgttcggagtttcttccttctggtgggttcgtggtcttgctggctcaggagtgaagctgcagaccttcgcagtgagtgttacagctcttaaggcagcgtgtctggagttgtttgttcctcccggtgggttcatggtcttgatggcttcaggagtgaagctgcagaccttcgcagtgagtgttacagctcataaaggcagtgtgaacccaaagagtgagcagtagcaagatttattgcaaagagcaaaagaacaaagcttccacagcgtggaaggggacccaagcgggttgccactgctgtctcgggcagcctgcttttattctcttatctggccccacccacatcctgctgattagtccattttgacagggtgctgattggtgctttacaatccctgagctagatgcaaaagttctccatgtccacactagattagctagatacagagtgtcaattggtgtatttacaaatcctgagctagacacagagtgctgattggtgcatttacaaaccttgagctagatacagagtgccaattggtgcattcacaatcccttagctagacataaagattctccaagtccccaccagactaactagatacagagtgcctattggtgcattcacacaccctgagctagacacagggtgctgattggtgtgtccacaatccttgagctagatacagagtgctgactggtgcatttacaatccctcagctagacataaaggttctccaggtgcccaccagactaactagatacagagtgccaattggtgtattcacaaacactgagctagacacagggtgctgattggtgtgtttacaaaccttgagctagacacagagtgctgattggtgtacctacaatcccttagctagacacaaaggttctccaagtctccaccagactcaagagcccagcctcctcacccagtggatcccgcaccgggaccacaggtggagctgcctgccagtccagccatgtgcccacactccccagcccttgggcggttggcgggactgggctccatggagcagggggtggtgctcatcagggaggctcccgccacacaggagcccatggtggggggttggggtggggagggctcaggcatggcgggctgcaggtcccaagccctgccccacggggaggcagctaaggcccgtgagaagtcgagcacagcagctgctggcccaggtgctaagcccctcactgcccggggcttgcgggccagccagctgctccaagtgcagggccgctgagcccacagtcacccagaacttgtgctggcccgcaagcaccgtgtgcagccctggttcccacccacgcctctccctccacacctccctgcgagctgagcgaacaggctctagccttggccagcccagaaaggggctcccacagcgcagcagtgacctgaagggctcctcaagcacggccacagtgggagccaaggccgaggaggcaccgagagtgagtgagggctgcgagggctgccagcacgctgtcacctctcagtaggagcactggggttgaaagctgcctatagtatactatgctcactacctgggtgacaagatcattcatacaccaaacctcagcatcatgcaatttacccgtgtaacaaacctgtatgtgtactccctgaacctaaaatgaaagccaagataaaaactagttaaaaataaataaataaatcaatccctattttctaaggacatctaaatgactgctcatgtcagtatggctacttcaaaataatatgtccttcctgagatgtatatgcctgtgaaggacaccagcagtctgagggaggagcagattcgaatggtccagtggaagaacattgaattggggatctgagaactggttccagctgaagctttgccagttaccagttgtttagtattggacaagtcacttaattccctgactctcaggtagttttgttgctgttgtggtttaagtatcatggggctaacactagtaatcttttcttggtctaatagtgctccatcttttcttcctaggtctagtcatattttgaaaacaaattagtttcactgtacatgctatttcataaatttgttttttaatttatttaaattatcagcatataatgagcattttcctatgtctttaggtagttttatgacatgttcttaaagattacgttgtattctgttatgagactataccatctttgcacaccaagcctcacttgtggaacgtggaaatgcctttatttcctattagaagtagtattaaccaggtgcagacaaaaggaattaatctggacttcttcaattgagattacacctcatgtgtttcagctacatagacccatctgtctctggctggaattaggagcctaaaaagagaaggggctgaaggactgctcacttagaagagtagaaggggctgaacaggacaggaggtgcatatgtttattgatggctgacatgccacacacttacatgtgttagtacaacaaccctgtgaggtaaggcttatcccccattacatttgctgtaagagctgaactgaatccatgctcacagctaccatgttgaaaggggaagctgagaagggcccagaaccaccgctgtgccactacccctgagactccaccatcctctcctccacaccatgacacctgaccctctcctttgcctgtccacacctaccatctcaatgccccactcttctcaaatgcatccctcagatattcactgatttatcctttcaggacttctcaatcatgtatttaccatcttattataaatgatctgatgctcagattcttagggttacaacagttgatttacatagccttgcctatgtgccgttaagtcacttcaagatggaaaactccctgattaaacttaagatgtagtaatcccacaacatgaatactctggactaagtatatattttattgtaaacagtcttaaataaaatatatacattgtttaaatctgctaaacactttttaccaacgtctatacacttcccacccacctccacccaccctcaaaatcaggccactcttcttgtagcaaaattctctactttcctaccagagtgtgtagtgttcatttgcatttctatttaggtgagtttatttcataacagtcatggcagtgggcagagcccacagaagtctatacccttctctgcctctaaacagtcatgaacaaatgaagtgagttagatgacttctaatatcctttccaaatttaaaattctgcataatttggccatatcttaatgttccaataaaatgcatctttccaatgtggtttagtttactgtgttaaaagtttgcacactaaaaattagaagtaagaagcctcagccaagcatggtggctgacacctgtaatcccagcattttgagaggccaaggcaggtggatcacttgaagccagaagttcgagaccagcctggccaacatggtgaaaccccacctctactaaaaatacaaaaattagctgggcatggtggcacacacctgtaatctcagctactcgggaggctgaggcaggagaattgcttgaacctgggaggtggaagccacagtgagccaagattgtgccactgcattctagcctgggtgggcaacagagtgagactctgttttaaataaataaataaaaaaggaagcctcccattcctaaccaagtaaactatgaaataatgagagactgtacatttctgttctactgctaacactgctagtgtgtggcctgtgacttggcaagctgcttcctgtttctgagccacagtttacctatttgtaaaatggaagatttgtactaaacatattctgagatgccttcttggccccggcattacagtattggattctaatcatgtattcattctgctcagaaatgtttctggtgtttctggtcttaagttatcaataacccctggtagagtctgggacattgggacgagatcctgcaagctcagcctaggcttgccggcagctgtttgaaggagtcactcgcatggaccagtaaagcaaaggcagcgatgacgcctcgcggtgagggccagaacccaagtccagggaaaacgctcctttagcgccacgcattacaaaacaacctctcctccttgctgacgctgccgccacatccggggtgaaaatcgagcctagatctttctgctccagcacagcctggcctgcagcggatgcgggcgtgagagggacgcaggagcagcgggggcggggatgctgctgaccgtggagaaagcaacctccttccctgaggggcttcccctctctgcgccaccatcccccaccccctgcaacagggcagcggctgaacccatctctgtaggtgggaggtgggatgggagggaggaggaagaccctctcacctgagcaggacttggaaaggaaccaggaagagagcccacttccaaatccagtctcttccactgaggttccacctgcatagaaggggcttcctgggacccaccaagcccgtgataccacttggtcatcttacaagagaagacaccaaagcccagagaaggaagcagctgtcccaaggaggagcagctaggtggggactagaaccaccatatcctggccccttctacttctctgtcccctccactagacttcttcagccaaagggggtttctctttttttagtttctttgcaaacctgcttccaaatatttgtattgacctatcggattgatacttaaagaatcagggatttgtgcatttgacacctgaaactcatctgtcccctaaggatcttcttgtgtgttctgcttaccatccactcagaatttttgcagctttttgagggtcatcatccacctgcagtcactttagagacatcagaaagtgtcatgatcatgatccccttgtagaagtgagaagtgtgtcctgcagctaatcccatccaccatgcagacaggatgctaaccagtctcagaggacaccattcctctggcccacctgttgggtggcttacctgactttctgccccagtcctgtctcagcatcatacacttgctgtttgaaggtggccatcccacgagtgggctaaactaggcattctaggactggtcaggaggtggcaagtcatcatgctgatcaattcaattagtaaaggcactgtttgggaagagagagggggacactatcaccatcatacgaagagctaatgttttttgagcatttactatgtggtagactttatgctaaattcttacaagtattgttttaatataatccttacagcaaccgtactattgttattcctgtgtggacaatgaggagacagaggcacataaggaaaaggttactaaatggggaataaggaaactcatcttccattctttctctatctctctgtaatctcgtgctagtcacttaaccttgcctttctggtacatgaaacatctgaattggaagaaattatgtgcatatgtgcatttttctggaaagagcagccacaattttcatcagcatctcaaagacacccattacccccctcccactcacaaaaaaaaaaaaaatcaaagaactctcaggactatctcattttatagcctttttcacactaaacaatttaccttgcattctcttctaacattgtaaataccgacgggcttgagcagtaccgataggcagattcagattacagtcacccctgagccaaagacctctctgtgattcaggggtgtgaagggctcctggctgtgcactggcctttccagcacacccgcatgtccagatagccatcgcaggaaggacgacgtggggatgggatcatcagattcaccctccagctacttgcaacacctcagcagttttacttcagcttgttgtattctttccttgcaactggactgtaagtttatattgcaaccccaagaaaagattcacaatcccttttttttattgtactataaaaagaattctagtgatagaacctccacagggcttgaagtgaagcagccattcattaagtgtctgctgtgtcctgagtatgccagcaatgaacaagacagaccaggtccctggctgcataaagagcaagagggactgtggcagggaagtgccacgcagatgcagagagcacgagagtgaggcctggagaaccaggaggggcttccttgagaagtggtgtttgagccactgaaggatccctgaagaatgcctcatccctgatggatgaagagaaatgaattaagcaagaggcacaggtcagaggggtggaagagcattctgagagggatgggaagggcccaaggcaataaagaacttggcccactggaggaactgaagggagggcaggctaggtgccaagagagggagagtggtgtgggagatgcagccggagaggaggcagggccagtgtatgcagggcccaggaatcgccaggtgggatgctaactggctgtgggctgttggcaaggcaggtaacagctcacatgttccatttccttatcttcaaggtgagagtcttcaattagatgatctcgaaagccctttctgactctaccatcctgtgatattgtgacttcaaagaaagtgaagtgattgctgagaaagagaaaagtggcccctgacaacctggatctgggtggtcccataagctaggccttggcgttctcctgttaaacataaacaacttcacagaacatcaacagcaagcaagatgtctctgtgaccatgataaagacaaaaataagaccactccacaatcatgtctgaacacagacaaaaaacgttaacattgtccaaaccatggaactaaccaaacatttccctattctggctcggaggagtgactgctactcctttacccttacagcttcagtctcacttagtcttcctcccttctagacaagatttattaagatatggaatcatagaatttacccctgcttctgacagcatgcaaagctccacttccttaaaccgtccccaaaatcgcctaccacaaaccgcactcctgtaagtcctttctaacaccctgtcggtgagacaccccaccgttctccttctctgctatgtcctgtccaagcacagggtgttcctcatgcaagtgcagggctggccatgagaagcaatgccaccctacactttgctctcctggtgtctctcttgtctcaccagttccagcccagtcctgggggtctttggctggatggagttgacatcagtccccttccctgctcttctctaatctcaccacaggtaccctgctctgggcctcagggtgttggggagtagagctgggaagtagcggaggagaaaatgaggaagagaaatgcaagagggcgacttcacaggggaattttgtccacctgatgatgtgggaacggaattaaaactgtctccagagcgaatgtttcttctctcacttgaagtctgggcttcctccttttatgtctatgccccacccagattacgcatgggctacttgggcggttgtggtatttctgtttcccaaccaaacgccaccacctccccttaaagccatcttcacaggaaggtaaccagctcccggtggaactgacccatttgacagtatctaaggggaacaaaaattgttgctgctgctgattcagattcacagcttggacttcccacccttagctaaaagtttttcactggggggagtccccaccacacaacctactctattcatgtgagccagtggtaaacaaaccagactcctggtgcctcctgagtcagatgataaccaagggaaagaagtgacctctatctctggacacaaaacaaactagaggacccttactcctctgattgagaaagctggtgaagtcagctcctttcaacttggagaagccattgctcacatcaggcgcataactgtttccaaagtcatggaaatgtccagttcatggcaaaagtagggttttctttgtgcttagtttcatgaagaggtcaatcaactttttcagtaaaaggccaaatattaactattccaagctttgtgggccaatctttggcataactactcaaatctacccttgcagcacaaaagcaaccatagatataatgcaagtgattaggcatgactgtatttcagcaaaactttatttataaaaacaagcacaccagatttggcccatggaatgtagttggctggcccctggtgtaatgtaaccaacacgtgggcacagctgaataagaagaggaataataacctttgcccattactttctaaagagcttacttctcattagacagattgagaggtttaaaatcagtttggaaactgctggaggatggaggaaaaagagggagagaagaaagaagaaagcaaacatgagaggatggaattttatttatttcaaatggaatttagttatttcaaataagtaatggaagaatcagagtggaaagagttatttgtaaggcctctgtatagcaggctgaccctagtcatctcttaccctgaccagctggacaggagtcactcactgaggctcaggctatgtggactaatccaacttcaaagtcaggtttatagaaacatgtgtgggcttctttggggaaagtttatctgagacagtgttcctccggaccagcttcgggtgtcattagcaacagagaatcttctcatagagacaactgaatgtagtatgttccaggatttattttttaaatgctggttcctgattcttctgggcaaagccgaagaaggcagagagacactgagagtgcactgcatcagcacagattgtggaatgtttaggaccatttcagttcccaaagaaagagcccctgaagagctcatagaaagggctcgcaggagagtagagaaggaccagggagtgctggacacttctaacagtcacaggtgctgtgacttctaacagttgcaggtaaacagggtcccagaccttcccatctgggactgatggattgattgtgaagaatatatactcattccacaaatttaaaaagggaattaataatgaaagacttaagtgtaaagtagagcacccaagactctgctcggaaaggtagacgcaaatgataaccacataggtaaatcccctgcatgtggctgggaagagagggtgagaagtagtctatctatggttagtggccattttctctagttcacagaccatgcatattgattatagattcagaaagttaccctaactttacagcaatgacttctgaactgtgctttcctggaatactggtttcataagatgttagcagttattttgcaggagaaaggtttcagggaaaccgaagaatgaattgacattgacaggaaactgttgtgtatccattcaaaatacatttttgtttggctgtgttatccttggagaaaagtaatagtatcagaagaatcctgggcaatacagcaaggtcctgtctctacaaaattttttaaaaaatagcctggggtagtggcatgttcctatagttttagttactcaggaatctgaggcaggaggatcacgagcccaggagttctagactgcggtgagctatgatcatggcactgcactccaacctgggcaacatagtgagaccatgtctctaaaaatgataatacataaataaaattacatttaaacaatcatttttaggaaacacaatttttagagctcagaacagaatatgaccctggacagatgcatatgaaagacggtctagcaatggctttcaaacttcttaaaacacaggttgctggtcccacacccagagtttctgattcagtaggttgggatgggattcgtgtttctaacaagttcccaagtgatggtgctgatgctcgtccaaggaccacaatttaagactcacttccctgcacccggccccatgcccaacagataggaggctctttttacagtaacaagaagtttctttctgagggttaccacattaaaagaaatcaattgaatgggtttccaccatgtgtgaggatatattggctgacccagcatcaaagtcagggttagaaacatccatgggcttatttggggaaagtttattccagacagtcttcctccagaacagcttcaggtgtccttagcaatggagaatcttctcatagaggcaactgaatgtagcatgttccaaaattcattctttaaatgctggttcatgattcttccgggcaaagctgaaggggccagctaataaatcaacacatatttcctgacatttcctgacagggagacatgttccttcaaaaatgggaacaaaattcataatgaatttagtggggaggcatagttcttcaaaaataaaattcagtttgaacattttcaatctgagatatttggggattaaaaaaacagatataggttctgaagggactactcaagcaaatgtatattaggaaatcaaggaggccctagaaggccagaatatggacatgagtcagccaaattgtggagttatggacaaaagctaacaaacacatcttgaaatctccagtgggacgcaaattcttttaacctcaggtcagccccaaatcatggtaccaatttctgttaacatgctctaaaaaatgacatgaagaacttagaataggttcttggcatattaacaaatatatctagaaaaatatgaagtagtcctaagcagaaaggtttgaaagaaatttggatagttaagcctgaaaaaaaagtgaaggtgattctatctttaaattaatgaaaatttttgtctctggcctttcattgcagtggtaaattaggcaagaataaatggccttaattttaaaatagatgtgattttagttaactgtgaggtaaaatcttctttaaaatggggtaatgaaacactggaggcttgttattttgggcctggaaatttgtagagatgctaattgtagctaacagtacttatgcttttttttttttttttttgacagagtcttgctctgtcaccaagctggagtgcagtggtgtgatcttggctcactgcaacctccaccacccgggttcaagcgattcttctgcctcagcctcccaagtagctgggattacaggagtgcaccaccacgcccgactaatttttgtatttttagtagacatggagtttcatcatgttggccaggatagtctcaatctcctgacctcatgatccacccacctcagcctcccaccttgggattataggcatgagccaccacacctggccgaagtgtctttaaaattccacagagctcttccttggttcctgcacaatctcaaagccaattgaaagaattgccatactattgaaaaagtccaaatgcccaccaatgggaaaatgaatgaataaattgtgacatattcacgcagtggaatattataccgcagttaaaatcatggattatagtaaagtacaacaatatagatgaattttattaatacgatattaagtgaaagaaactcagaagattacatatagtatgatacccttttatgaagcttaaaacaactaaaattttaaatacattttgggaacataggtagatacaatataatcatataaaaggaagacaagcaatgaccacaatgaaaaagactggcagtaccaagggtggacaaggacatggagtgatagaactctcatagagtgcagtgggaagataaattggtacaacactttggaaaactttttggtagtatctactaaaactaaagatacacaaattctatgatgtagcaactccacttctaggtatatattcaacatacattcacaaaaaggcatgtttaagaaagcttatagctgagggtggagcaagatatctgaacagaagcctccactgatggctcccccctgcaggaacaccacattttaacaactaactacacaaaaaagcaccatcaaaagaagtaaaaatcaggtgaacagtcacagcacccggtgctaatttcatattgctcaaagaggcactgaggagggtaggaaagacagccttgaatcgctgataccacccctcccctatccccccagcagtggccgtgtggtgcaagagaaaatctgtgcattttggggaaggagagcacagcgactgggccacttggcactgaactcagtgctgacctgtcacagcagagagaaaagctgtgctgggctcagctggcattcgctgaggaggagggagcatttggaccagccctagcaagaggggaatcacccacctaagcagtcggaacttgagtttctgcaagcctcaccaccacgtgttaaagtgctctggggtcttacataagcttgaaaagcagtctaggacaaaaggactgtaattcctaactaagcaattcctagtgctgggctaggcttaacactagagccagtggactagagcagcaggtgacctagggagacaccagccagggtggctaagggagtgcttgttctacccatctcccaaccccaggtaacacagctcacagcaactaaagtgactccttccttctgcttaaggagagaagagcaaagagtaaagaagactttgtcttgcaccttggataccagctcagccaaggtaggatagagcaccaggcagagtcataaggcctccattccaggccctagttccttgacaacatttctagacatgccctgggccagaagggaactcactgccttgaaaggaatgagctagtcctgacagaatatatcacctgctgactaaagagctcttgggccctgaataaccaacggtgatacccaggtagtgtgccatgggctttgggtgagactcagacatgctggtttcaggtgtgacttactaccttcccagctggggtggcaatggcaaaagattccttctgcttgagaaaagtaaaggggatattttcttgctggtaccttaggtaccagttcagccacaagggtgtggagcaccaagcgggctcttgggtcccgagcccaggtgtaggctcctagacagcatttctggacctgccatgggccagaggggagcccattgccttgaagggtgagtcccaagcctggcagcattcaccacaacctgaggtgcccctgggctttaaatgaacatctgcagtggccaggcagaactccccctgagctagtggtggtggtggccaccaggaggggctcctctgcctgtggaaaggtgagggaacagtgagaaggactttgtcttgtggtttaagggccagcttagatgcagtagaatagaatgccaggtagatttctaaggttgttggctcaaatcctggctcccaactgtgtctctggacccacccaacgcctgggggaactcactgcccttaagggaagaacacaagcctggttggcttcttcactgctgatggcagagccctagggcactgaggtagaacatagatggtagccaggtagtggttacagcaggcctggggcaagacccagtgctgtgacggcttcaggcctaacccagaacagtcccagtggtagtggccacagggaagcttgtgtcaccgcacctccagctccaggaacctcagcacagaaagaaaggctgtgtttgttttggaggaagtaaggaggagaacaagagtctctgtctggtactatagagaattcttctgggtcttatccaagacccctatttggaaatacacagtcagaggagacaaaagaaaaaagaacaaaaaagaatgaagcacacctagaagatcaagagaatgccctcaaagggacaaatctaagagttactggtcttaaaaaacaggtagagaaatagataggggtagaaagtttattcaaagggataatatcagagaacttcccaagcctagagaaagatatcagcattcaagaacaagaaggtaatagaacatcaagcaaatttaacccaaagaagactacctcaaggcatttactaatcaaactcctgaaagtcaaggataaaaaaggatactaaaagagcaacaggaaagaagcatataacatacaacagagttccaatatgtctggcagcagacttttcagtggaaaccttataagccaggagagagtgccatgacatgtttaaagtgctgaagaaacaagacccaatgatctgttgcctataagaaacacatttcacctataaaggtacacataggctgaaaataaagggatggaaaaagatattccatgccaatggaaaccaaaataatagagcaggactagctatacttatatcacatgaaatgatttcaagacaaaaattgtaagaagagatgaagaaggtcgttatataatgataaagggatcaattcagaaagagggtataacaattttaaatatatatgcagccaacactggagcacccagatatacaaatcaaatattattagagctaaagaaagagaccacagtacaataatagctacagacttcaacaccccactttcagcattggactgatcttccagacagaaagtcagcaaagaaacatcagacttaatctgcagtatgaaacaaatggacctaatagatatttacagaacgtttcatctaacagctacagaatacacattcttctcctcagcatgtggatcattctcaagtataaaccgtatgttgggtcacaaaacaagtcttaaggcattcaaaaaattgaaataatatcaagcattgtctttgaccacaatgaaataaaactagaaatcaataacaagaggaagtttggaaactatacaatcacatggaatttaaacaacatgttcttgaatgaccagtgggtcagtgaaaaaattaagaaggaaatttaaaaatctcttgaagcaaatgataatagaaacataacataccaaaacctatgcaatatagtgaaagcagtactcacaggaaaattgaaagatacaagtgcctacatcaaaaaagaagaaaaacttgcaataaataacctaatgatgcatcttaaagaactagaaaagcaagagcaaaccaaactcaaaattagtagaagaaaagaaataataaagatcagagcagaaataaatgaaattgaaatgaataaaacaataaaaaagatcaattaaatgaaaagcgggtgttttgaaaaaacaaataaaattgacaaacctttagccagactaggaaaaaatgagagaagacccaaataaataaaatcagagatgaaaaaggagacattacaactgataccacagaaattcaaaggaacattagaggctactgtgagcaaatatatgccaataaattggaaaacttataagaaatagataaattaattgaaacatacaacctaccaagagtgaaccaacaggaaatccagaacctgaacagaccaataaaaagtaatgaaaacaaagtcacaataaaaagtctcctagtaaacactgggacccaatggctttactgctgaattctaccaaacatttaaagaagaatgaataccaatcctactcaaactattccaaaaaacagaggaggaaggaatacttccaaactcattgtatgaggccagtagtaccctgataccaaaaccagacaaagacacacacacaaaaaaaagaaaactacaggccaacatctctgatgaatattgatgcaaaaatcctttaaaaaatactgacaaaccaaattcaacaatacattaaaaatatcattcatcatgaccaagtgggatctatcctgtggacgcaaggatagttcaacatacacaaatcaatcagtgtgatacatcataacaacagaacgaaggacaaaaatcatataatcgttttcaattgacactgaaaaagcattggataaagttcaacatcactttatgataaaagccctcaaaaacctgggcatacatggacgtaattcaacataataaaagccatataaaacaaacccacagctagtatcatacagattgtgaaaaaaatctggaagcctttcctctaagatctggaagaggacaaggatgcccactttcaccactgttattaacatagtaccggagttcctagctagagcaatcagacaagagaaagaaagaaaggtcatccacattagaaagaaagaagccaaattatccttgtttgcagaagatatgatcttatatttagaaaaacctatagactccaccaaaaaaactattagaatcaataaacaaattcagtaaagttgcaggatacaaaatcaacatacaaaaactagtagcatttctatatgccaacagtgaacaacttaaaaaataaatcaaaaaagtagtcccacgtataatagtcacaagtaaaattaaatacttaggaattaatcaaagaagtgaaagatctctacaatgaaaactataaaacactgatgaaagaaattgcagaggacacaaaaaaggaaatatattccatattcatggattggaagaatcagtattgttaaaatgttcatactgcccaaagcaataaaagatttaaggcaactcctatcaaaataccaataacattcttcacagaaatagaaaaaacaatcctaaaatttatatggaaccacaaaagacccagaatagccaaagctatgcttagcaaaaagaataaaccagaggaatcacattatcgactttcatattatgctacagaagtatggcaaccaaaacagcgtggtactggaataacaacagacacatagctcagtggaacagaatagagaacccagaagcaaatccacacacctacagtgaacttgtttttgacaaaggtgccaagaacatgcattggagaaaagactgtctcttcaataaatggtgctgagaaaattggatatccaaatgcagaagaatgaaactagacctctgtctctcaccatatacaaaaatcaaatcaaaatggattagatacttaaatataagacctcaaactatgaaactactaaacaaaaacactggggaagctctccagaacattgtagtgggcaaaaatttcttgagtaacactccagaagcacaggcagccaaagcaaaactggataaatgggaccacatccagttaaaaaccttctgcacagcaaaagaaacaatcaacaaagtgaagagacaacccacagaatgtgagaaaatattcgcaaactagccatctgacaagggattaataaccagaatattacaagctctaacagctctataggaaaaacatctaataatccgatttaaaatgggtaaaagatctgaatagacctttctcaaaagaagacatatgagtatgaaacaggaatatgaaaaggtgctcaacatcactgatcatcaaagtaatgcaaatcaaaactacagtgagatatcatctcaccccagttaaaatggcttttatccaaaagacgggcaataatgaatgctggcaaggatgtgaagaaaagggaactctcatacgctgttggtgggaataaaaatcactacaaccactatgcagaactgtttggaggcccctcaaaaaactaaaaatagagctaccatacaatccagtaatcccactgctaggtatatataccccaaagaaaggaaatcagtatatcaaagggatatctgcactttcatgtttgttgcagcagtattcacaaaagccaagatttggatgcaacctaagtgtccatcgaaagatgaatggatacaaaaaatgtgttacataaacacaatggagtactattccatcataaaaaaaaaaatgagatcctgtcatttgcagcaacatgaatggaactggagatcattatgttaagtgaagtaagccacgaagatggactttgcatgttctaacttatttgtgagagctaaaaattaaaacaattgaactcatgaacattgagagtagaaagatggttaccagaggctggagagggtagtcggggagtggggaggaagcaggggtggttaatgggtacaaaaagtagttagaaagaatgaataagacctagtatttgatagtataatgggatgactatagtcaataataatttaattatacatttttaaataactaaaagaaaataattggattgtttgtaacacaaaagataaatgcttgaggggatggataccccatttaccatgatgtaactattacaaattacatgcctttatcaaaatatctcaggtaccccagaaatatatatacctgctgtgtacccacaaaaattaaaaattaataaaagaaagttcatagcagcactgttcattaaaaccccaaagcgttcattagcaggagaatggataggtaacgtgtggtagaatcataggaaaatactatacaataatgagaaaaaacaaactatggttacatacaatatagatgaatcttgcaagtatgttggacaaaagaagccagatactacataattctacttatataaagttcaaaaacaggaaaatcccatctttgatggtagaagtcagagtactggccatctttggggaaggtaatgactctagggaggcatgagtgggggctccggagttctggttctgttttttgatttggatgctggttacatgaatgtttacattgtggaaattcttgtatgatttgtgcatatctgatgtctatcatgcttcaattaaaattttattttaagagtgagagaaagataagggagataaagataagggagtaaaaatagataataacaaataggatggaagataagaagtatcaataagcatagttttcaaaatatatttcaaaggatatacagtatgaataggtggtaaaatctaagtaaaatcttttttgcaatgtttttcatgtttaacgtttatgtcccttcatatagccattgttttaataacattctaccacatattttctggtttaaaagtaatgtacttgtctgtgtgtatctatggaggattggttcaggaccccctcagataccaaaatctgcagatgctcaagtctcttatataaaatggcatagtatttgcctataacttatccgcatcctcctgtatattttaaattatctctagattacttacaatatctaatataacgtgaatgctccataaatacttgttatactctattgtctagggactaatgacaagaaaagaagtctgtacatgttcagtacggatacagccattcatcttttccaaatattttcaatctgaagttgactgaatccatggctgcagaacccacatgtatggaggaccaagtgtacatgtttattttattaaatttcagaaacaaaaaataaaacagggaagaaaccagaattccatcaatgagatctaatcatccttaacatttcggtgtgtatcctaccagtctttctgtcttatgatttatgaagtttttaaaaggatggggtgaggagagaagcaaggaatgataggcatgtggttgaggataatggcttctttagtgccaacatggcacatgtatacatgtgtaacaaacctgcacgttgtgccaatgtaccctagaacttaaagtataataataaaaaaaaaagaggcacaagaacaggatgtaatacaggaacccaccggtaggttactatgggtgttttttgttttaggtggtagattaattattaaaaataacttaggaaataaaagtcggccaggtctggaccaataatgaggatgtatcaccaacaaaggattatgattaatccaattttgtgcacctgcggtccaattaaaactaaaagaattctcataataaatagattctgtgctgtaattgaaagtaagtttagtcctctgaagtcctaaactgacattttaaagacaaactgtgcactgacaaatcggggggaaaaaattacttcccttttcagtaagaagaagcttgccctttgattactaaacctcacatagttttacaatgatttgtgaattccagctcctgttcatgataacattggccataatgattcaaacgttcatgtgtcagaacgtttcagtgtaaaccagataaacttcccaggtcccttctatctctaaaattctgtattttagattaatgacctgatgtgtctacccactcaattaataaagcaagaatgacttttccagaccctttcctgttaattacacagagagtttcaactggggacagttcttattgctcacagcaaaaatccagatttattggtttgttttcgtgtttatatccctgttgctgttaataaaaatgaaaggtttaatgtgttgaggaaatcagggtaaaatatgtgcaagaatttaaaataatgcacacgtaatgttagaacactaaaatgcatgcttttggtttctattttagctacagcggagccacaaacttggcttacagcttcctaacactcaaagaaggaaacaggagaagagagaagatttgtaatgcctataaaataattttggccaggttttccaaagaaaaccagaatttccatgtgcttagaaagatgtccccacgatgtgctagaacaggcttctatcggcgcttgagagccgatggttaaatattcagattttttacaaatatgttgttaaaccattggtagcttgaaactgaccatggtgggaatatttagcatacaccacaagtcaggtcttgtttttcttttagaagccagactacaagcacaccaccacatgtccccagtggtcctcagacaaagacactgtgtgaggtcaggagagttgcaagtggatggggaaaggctcagtgtacaactttctatgtacaatagaaacccatccctcaggagtagcggagaacagaaacatatgcctgaccagagaatgacttcaaagttacatcagcagtcacccaccccacctgagtccttctttccaataataccctttggaatttcatacctgggattacaaaaactgctatgcccattgaggggcagacatatctccccattcaaagatacacctaaacaaatgcgagaatctcagattacagactttatgctttccactcagtcagcccttccaagcccatgtttcacggcatcatgaaaagtgtccttcagggaagaaaaaaagtgtcccataccaaaataagcaataatctttattgcaggacttctcagagcctttaaggaggcatatgtgctcctgtggcagagtgtacattagttcccaaacttgttttaccccagaacacttcctggtgacacatcttgggacatcatactgaaaaatgccaccctgggtagtcagggttccttatgatttggagaggcaacgccaggatgttattccacagaaatgtttcttttatgtaggacttgaggctctggcatttttctttataaaaacatgagttgcatatcttcgcttttcaaatgaaccatttcattaactctgttggtgttcatacatccgtcagcagagctgacttaaggcataaaggaaacagttcaggacaagaagtttcttaacttcctgtgggctatgtcgccagcaactcactcagtcctatgtggacacagagtttgttatgttgccggcagtacacacaagtatgcacccactcaaccatcatcatggagcccctccatgttccaggccgcggatgggacagacctggccctgtcttcaaggagctcaggatgcagcattaatgaatgtcagcttcctctatttacagcctttctttgctttgtctaggcttctgtttccccactttgctctgtgccctgtgctgctcctcaccactcttgttcatccttttccctcccttccctgatagctttttccaatgactcacaagaacccacccagctcagctgcttttcattacgctcctgtctttgcatttttccaactcaattaagccattaccagaactaaatgaggcatggactccccaaaagtcacacctgttgtcagggagatggagggcaagaccatgtgcagctggcaggcagacagcagaagccgggcttgggcttgcgggaggcagccaagggtgaccgggcaatttgtgtttcccccagtgccgaaagagggccctcattttaaaacaacatgtgccttgctttggtacagaaggaatgaagtctgatatagaactagggatggccgtattggtgatggcaggtaagagtccctaattctttggcaaatgtgcaccagctgtgtatagaaacccatattgtggatgtctcttcagcaagaggtaaaggaagctgcaactacagccaggcacgtgagtttggtgattattgattaaactttttcaggtttatttttcctgttcaccctcattaaaacatacacatttcacctttctgcaatagtggcttcagaccctactgttagtatctttatgatcattgtgacgaaagagagtaaagattacagtacaataaaccagagacatagcagtgtactcacgttatggagataaattctattggaaatcaaatttggtcttataattctcttttttctaggcaacctagaattttttttttttttttgccatctaggaattcaaaaatagtagcttttgagcttgctgtgcctttaatttactgagtgattttatgttcagaaggtctgcgcctgggttttctctatttgaaatgtgagcaaaatcattttgctctagagattcacaatttccagaaatgttgaggccaagaggtgagagtaggggtggtttttatttggaagaaaattgaaatgtggcagtgttcactcctgacgttgttttgctatcctctgttaacttgttttgactccggaacttggattagccacgtagctactctttggacaacaagttcaacagacatttttagagcatccatttagtaccaggttctttgtttgatgctgaggatgcagctatgatcatggagaagcctctgcctacaggaaccatcagtctcgtggggtgaccccttccttgtcctgtccaggaattgcccaaccagcctctggtctttactgtgtacacttcatacatttgttcaacgaatatttgtgaatcatttgtgccaggtgctgtgctgggtgctaggcaacaatggtgaagaaaagagacaggccttggcctcatgaagtttctggtccccaccttgacttaattctctttcccagcaatcaccagagaatatcactatttgctctgtgctccctcaacacttaaaccatgcctctttataacatttagatcaccgtccttataatgcgcctttctgtctctttttaaaccttgagcaccttgaaggcaaaaatttcaactttctttccctagtgtcttgcactccctggtatctagcacatagagagctcaataaatgttttttgaatgagtaaatcattgcacgaatttataacttcatgaacccatggaacccattgactggtctgccctcatctccgatccttggctgaaaagcctaacaagccattatctgtccgtactgaaacactcctcctgatgtcaagaaccttctaaacataaaaccacctggtgcacggatcatttcttcttccaagatgtatctgccattgagagaaagaacaaatactagcttcagctttgtttgtaacactcatttgcaggaaggcaaacatgattatatatgatttaaatggaataaatgtatagtaaggagaacaaatgagtttatttgtgattctttgctagatactgttggagataactacagtaagaaaaaatatatataataacagtggtttaaaccagccagaagccttttttctctgtcaggcaaaagtccaggaatagttcaatattaaggttctgctctatgaaaagcttagctcatggcaccatcatttcctaggttgtagctccttgttcaagatggtctctagctgtcatatccacctccgtgcagcagaatagaggaagcggggagaagggataaggggcaaccaggagtcaagtacaaagaaaataaagcttttacaacatggaaggtggaaggtgatgggagctggacgaaggcactggccacaggagtgtgtaggagaaggcagagtgggaagcaatggcagaatcacaggaccaggagactggatgttggaggacagggagatggaggatctagaatgaccctcagctttggaagcaaattcgaccctgacaactgaactcaaaagggtggtttgaagaatatgttagactgagagagttaactgctacaaattgaccccaaatctctccttcctctattccttattgccattaattttctgttgaatgaactaattaagttaataaactccaagtagttaatatttcacaggaaaaatttaacaggtctcagtgactaaccctagccagttataatgttctctctcccatctaattcagtccatgggactccttaaaattctgagttcttaaggcattcttaagacaagtgccaaaactgctcactcgagtaagctgaatatacaaagaatctatttccctatctagaaagtggacttggtattaccctcattacaaaattgttgtgaagttcaaaatacatggaatgtttaagggatctggcacaatgcctggatcaataaatgctagtttctgtctccttccaaagtactttcttttttaatgcttttattcgataaacatttattcagcatttactatttcagacactgtacgaagtaagtgctgcaggacaaagttgaatttagagaaaaagttacttttttttttccacttctgagtgttaaggtaaattctgatcatttagcccagcatgtctaccccctggactgagagctcctgaggatataaacatgcatgtgtttgtcacctttatattcccagcacatgtacttattaaatgtatgagtgaacatatgaccagggtccaaggaatgaggccaaaaatctaaaagcaggactagggtcagaaaactgggatggtcatggatgttcagacattacaggaggagactccatgaaaattgagcgtctgctggggtcatccttccacctgaggctcagcacactctgctaggaatgctgttggaggagaaggtggaattcctaaggagcaagaggcaccatatgacaatgattaagagattgagctctggaatcagacgtttatgaacataactgtaataaagtgtgatgaaccttccaagagggaagctccaagatccaagacataagagactatgttcttacaggtggacctcccctcacctaagggttcagggaagtcctccttcaaaagccttgcaaattgcttactgcacaactgaggggttaatgtgggctgaaatccaatctgtgttccactaaagctgtgcacgttgactcaaagccgtgtgctccccagaaggagctcttttcctcattcacccgaaggcctacagttcacccagacatgccctgcaattaaggacatctgaaagctcaaagataagtagatgttttccaggccaagtttaggccacagggaccaaggaggggaacagcaagtgtgagatctgagcattttaaaagcctgatgtacttgaggaactgaaagaagttcagcaaggttggagtgtgacatacaaagagaagactaacaagagtggaagggtattcattaaagccagtattttctatgagtttactagttacattgtgctaatggctctccatgcattattttgtttagatcacagacattaagtgacttgcccaaagtcatattagaaagtagtggaactatgattcaaagccaggtgtgaatccagagcctgtgctccaaagcacttgtcctgtggcatccaaagatttgcaaattgcaaaagagcaaaactggagatgagaatgccagttaagaaatagttgcagaaatccaggttaaaaatgatggcagggccaggcatggtggctcacacctgcaaccctagcattttgagaggccaaggtgggaggatcacttgagcctaggagttcaaggccagctgtggacaacagagtgagacccatctctataaaaaaatacatttaaaattagccaggtgtgggtagcatgtgtttgtagtcccagccactcaagaggcagaggtgagaggactgcttgagtctgggaggttgaggttgtagtgagctgtgatggcgccactgcattccaggctgggcgacagagccagattctgtcagaaagaaagagaaaaaggaagagagaaagaaagagagagaaagaaagaagaaagaaagaaagaaagaaggaaggaaggaaggaaggaaggaaggaaggaaggaaggaaggaaaaagaaagaaagaaagaaagaaagaaagaaagaaagaaaaaaaagaaaagaaagaaaagaaaagaagggagggagggaaggaaggaagggaaagagagagagagaaagaaagaaggcggggaggggaggggagagggacaaagaaaaagaaaaagaaataaatgatggtggactaaaaataatcttggaaatggcgaggagtaaatggattccagagagaattaagaagtagaatctacagggcttagggattgtgtaaatatgaaggacaatgatgagaacagaaaggaggaaaagatggctccttattttgtgtctctgtggatggcatgtaatcttctaagatagaaaacagtgagggagaaacaagtccagtagggaggtaagtttagggcctgttaaattcaaagaatctgtggaacattcatgtggcagtgtccagttggcagtccagtgcttggccctgagcctcaagacaggctggatatttagccccatcaacctgtaattggtaattgactcacagggtgagtgagatagggtgcggagtgagaagagcagagttcctactctactaatcatagtatagcaggagggctttctcctatatccagctgttgatctttgtaaaacacaatctaatccatgatttctctgaatttcgtataagaactgttcttaaaaggcttacagggtgtcatattacaaactgaaaccagagacctgcacaaaaaaaggagactatcataaaaaataaagaataagtggtcttttccaacatttttgtttggttcaaagtcagatttaagcttaaatatgactcattctctattttctttctttttttctgagacagagtttcactcttgttgcccagtctggagtgcaatggcacgatctcggctcactgcaacctccacctcccagattcaagcaattctcctgccgcagcctcccaagtagctgggattacaggcgtatgccaccacatccagctaattttgtatttttttagtacagacagggtttcaccatgttggtcaagctgatcttgaactcctgacctcaggttatccacctgcctcagctccccatagtgctaggattacaggcgtgagccattgcacccagcttcattctatattttctataagaacttacatgctgaataaaatatctctaatattattataacaaaaggagcttctgctactaataggccaaatttatgcctcattcacacaggaaaatgaatggattaaaatccagcatcagcaccagcagaggtcttaggttatcaagggcctctttaaaatttgacctctcataacctaacatagttcttccccaatatgggcaattgacgtttcctgtattttacatgaagtgctataaaaatgtgactccaagccaggccttttcagtctgccacccctaggcccctctaaatggaaattctgagccaccttagttgcagtggtcatcacaagatgggattgaggtttagctgaatccattttgtctttcttttcttttagaaggcatcacaggaggcctctgcatgatgtggcttccaaagactcaaggaccacccacattacaagtctggattgaggaaggcagaaatggagattcaaacaccacgtcttctattattttattaatcaatctgtagacatgtgtccccactgcagggagtgaactgctccaagggagaaacttctgggagcctccaaactcctagctgtctcatcccttgccctggagagacggcagaaccatggcattttatagctgctgctgggtcctcttggcactcacctggcacacctctgcctacgggccagaccagcgagcccaaaagaagggggacattatccttggggggctctttcctattcattttggagtagcagctaaagatcaagatctcaaatcaaggccggagtctgtggaatgtatcaggtaagaagaggggcctaatctgccaatctcttctcttctgagtggttggagaaaagctgcaccaaacgcaaaataattttttcaaactttgtcctatcttttcaagaatagtgattgattggtaatcatgctgaagcttattgcccccacaacctgccttttttttcctgaagacttctttttaaataaaatgtcaatgatattaagtagaaaatccatgcatggcctgttaaagcacctggtggtcatttggtgaccaagttatcatcgttcacctggcagcagtgttgcttaatggaagactaagtacctagaaggaaatttattgcaggtcttgcaaacctgagtagtaaaatcccccattgaccttacatgctccaatggatagtaatacctgagtgctggctgcctcactctttttcttttttttctttcttttttttaaggcatttaagttgaaagaaaccacagtagtcagcatgacccaggcatcttcaaactgtaaaatgtagtccatagcattttggaactactgccatcaaaaagtcttttgcataggaaggttatccccccttgccaccctccccaccccccatccaccctgccaagaatgcatctcactctctcaatagattctctctgtggccacttgaagagagctaatatgtctcatcaaatattttcttctccaagccacatagtctgttttatcatcattttctccatgatatgctttccagacccgtcatcatcctggttgtcctccatctgatgccccctaatttactgcgacccttttagaatatagtctccagggtgaggcacatctctttaaatgggatctgacttctgcagaatatggttgggactgtttatcacctcccctaatctacactggagactgactgtgctccaaatcttgacccatcttctagagagacttgcaacttccagaagggatccagcacttttccttgctcttcccaatagctggaaaatgaaaatgaaaactaggattgttccaataaaactggatttctgttcatgttctaatgagagctagtaaattgataatattttcacatttttcttatgaatgcaggaaatctaagtgcagaatcgcactgatgctgatgatatccttcacataacccatgtggacaaatactctgttgtaccctgctgcacagagctgtacatgtgccatgtgtatacagacctaagatcaagcaagaggcttgccctaaaataatatatatttttaaattatgttaaagataataaaattagcttagcagcaaagatgtttaatgtaaaaaaaatctgtaatatttcataataactttgtagatttaaaacaaatagttaaacaaatacatgaaggaaacttaaagaaaatggtaacagaaaacatcacattaaaagttagaccaagagcttagggaacctaacaatacaatggagtataaaagattgtatatctcacctcctgtcactgtcactgagttcaagtagtgaaacccacaatataaagaacctggtgagttgttttttcctctagacacaaatacactgattcagcacatttactgagccctgactctgagcaaagtgctagggaagtgaaaactatgtcactgaccctatttctcttgttaacttgtttgatttttatttaaaatgttcttctttgaaaagcaatgcatgttcattttttagatataaagtataaataagccaaaagcacataattttaaaactcagcattccacctcccagaaataaccactgttgtacaccccagactgtctgtgtatggccttcataggtttgttatttgtttacaaaaatgagatcattcacgtccctttccccttgaccttcaggaatgtcatagtctaaacatatgactctgcaaatctgatctgaggttatttttaggcacccacatattaatatcctaatgtatttatgttttcctggtccttttcttgtacatctacatattgcttttatttaagtacctcatatcagctacttcaaattcattactgcagaagacagatacaaattattcaatgaattacaaatagcaatcttttattcttctttttatttttattattgtcattattgctctctgtctctgtgtgaggcaccatgctgaagattttgcataattagctcatgtcatgatcttcacagtcaccctatgaggcaagtgtcatcctccttttatttttatttattcatttatttttgagatggagtctcacgctatcacccaggctggagtgcagtggcacaatctcagctcactgcaacttccatctcccagattcaagcaattctcctgcctcagcctcccctgtagctgggattacagacacctgccaccacacctggctaatttttgtatttttaatagagacggggtttcgccatgtttttggccaggctggttttgaactctggacctcaagtgatccacccgcctcggcctcccgaagtgctgagattacaggcgtgagccaccacgcccggccatgtcatccccattttaacagagagggctctgtacagagcatgccatgaagccagagagtagtaacagttcgatgattcaaacccagctttgccaggtctttactctaaagtcgttgactagaaagcttcccattttcttccacttcttctttcttccaggtataatttccgtgggtttcgctggttacaggctatgatatttgccatagaggagataaacagcagcccagcccttcttcccaacttgacgctgggatacaggatatttgacacttgcaacaccgtttctaaggccttggaagccaccctgagttttgttgctcaaaacaaaattgattctttgaaccttgatgagttctgcaactgctcagagcacattccctctacgattgctgtggtgggagcaactggctcaggcgtctccacggcagtggcaaatctgctggggctcttctacattccccaggtactcaagccttctcaggcggggcactgggagcaggatcagaagaagcaggcttgggggtgccatgcccaatagccatacggtttaccatattcccatctctggcacaaaagacctatgatttagttgatatgctgtatcatgaccatttgggatttctgaaactccagtgtccacaatatcaatgataccttcactatgcttccaaaattcttttaaatgtaccttgcataaaactgtgtctttttttaaaaagaggcattcagttatttatttcccactctattcctttagtaaattttttttccttctacttttactaaaaggaatcagagcatatgaggtaaatcccacctctcaaatccaaaatatctgtcccgaattccatttcctgaaaagtctcgctgctccactgtctcattgaaactttagctcagagggaagcagagcatattttctcacaaaacaggaacttaatcattgtgttgcacattccagaaacggagaaaattctatttcattcaaaaaatatttattgagcatatatgtataagcggtctccactttgcgggaacttagcctaggtggagagatggttgcgtttccatttactaacagtttattgaagcaagtgctttaataaacattcagtggtgcatttttttcaccaaaaaaagataacaaatgtgaagtgccattttataacctgacattttccttcttaacgctatagagcaaagcatttttcagtttaatatttataaatctatgacatcattttataatagtgaaaaaatggaaacaacctaaatgtctgtgggtgggagaatcagctcaattgtgatgcatccttacatcaagtttgaaattaaactataaactataccttaaatttattttttgaatgtttaatatttaaaatttgtaagagtacctttgataaatttacatttctatgttgggagggctccttttttttttttttttttttggtgattgccattatctctttatatacatgagacaagagatagttttgtcatcattgacggaatccttacttcagggaattaaaggtgtttcccatggggaagccctggctttgtaacttttgtgccaaagtgatctgacaaagcctgtatcagtaaatgtgctgcgtatattcaaacttagatacacgttaaagtaagttattgttaccccatggccaacaggctaagatgtcaagtaaagaaagaacatgaaaaggggaggggcgtgttaattctttgtgttttggatgaaagataaggttaagttgagtttgaattataaaagtgctttgattatcaatcaaaccaatataagtctatctacagtaggggttctctgccatgtctgccatggctacctattggaatcacttagagagctttaaaaatactggtgcctaagtcccactccgcaaagatcaaggtttaattgagctgagatgcagcctaggtgtcgggaggttttaacactctggaagtgattctaatgtgcagctgggctgggaaccactgccctgccgggtgaggtcatggacccaggggtatttcgtatgccagccacgccaccaagtggatggaacaagcagaccagctagacaaattgcggttggaacagttttctgaatcattcttgaaattctcccctcttacaataaaaaaaagttttgtgtgtttctgaggggttttttggggggttggggcacaaaatggtatttaccccactttagagttgctttttaaaaacttggtaaacattataaatacgttccttaagagaacatatccatgaggaatattattgtttttgatttttattccattgaagcccttttgacctatttttgaaaaactcaagaagcaagcaataatggatggattttttaaaatggtaggttttgtgtttgcaaaaatctgatttagaggcctattgtttgggtctgctaacagaattctctgaaaaacaataacatctaaacaaattacttaatttaaccacctgcctcataagttctgtggtatttcgagaataccttattctgataagggaaaaaattatcaattttatactataacttctaaaataaaagctcttgtcagaaaacagtcatacttactttttagtcaagttggcctaatttttttacagaccaacgccttttatgtttctaatgtagaaactatccatcaataagaagaaacacattggaaatttttttttttttttttttgagatggagtctggctctgtcacccaggctggagtgcagtggcaggatctcagctcactgcaagctctgcctcccgggttcacgccattctcctgcctcagcctcccgagtagctgggactacaggcgcccgccaccacgcccggctaattttttgtatttttagtcgagacggggtttcaccgtgttagccaggatggtctggaaatttttacttaaaaatattggacatggaaaattaattgttttaaatggtgaaagatattaaaaaggcattctcccaaatacctttgacttgttttcttaagaagtttaaaatctctctggaaaaactagagaacacaagatattaagctacttcatttcctagaagaaattccatttgtgtaaaaatgtttcgttcttcagaaaaaatggtcccataacttggaacttcctaagtggtgagccatgatgacacagagtgctgcaaatgagctgaagccggcctcatcaaagatgtggatctcctcaagtgttggggtgaccaggtggggcctgagtggtcagagcactcccaccagggttgatcagcttcctctgtttgctccatgtgttgccataatgtgaaaagaagtgggaaagctctgcactaactaatgctttacatggtatttggctacttcttcaagcaacgatctcttaacatcaagggcaagactttcttcccttggtagtccacacccttgctcagatgcagaagtggctatgtcttagagagtgcaaacatgtcaagacagcttctccagggttcctgttcagcctcttaagattttcaagacccatatcaaaagcctgtcaagcaggctcagccatcacctataactgaataaaggaaagggctctggaaggtgcttcccaatggaagattcttcacaatgcgaccttcaaaagtgggtctgctaacaatgagttaatgggtgcagcacaccaacatggcacatgtatacatatgtaacaaacctgcacgttgtgcacaagtaccctagaacttaaagtataataaaaaaaaaaaaaaagtgggtctggccataaaatcaatccaacaatagtgggatggagaggaagggaggtttttctgatgatatttaattacatacgtcattgttattgtgatacagggggattgagcctagtggtcttagtggtctaattgagcctaaaagaaacagttctcagaaatgactgcaattaagcttagttttttctaaagtactggggtgcggggaggagagggaggaggaggaataaccagaggaggggaagagagaaattaggcagaataagaaaagggaattcccggggactcctctgaagagccttaagtttataatccatggggaacccgattccttccacaggcaaattatgaacaaagtgtttattgcagtaaagggaagttaaactcttcagatcagaagctgagcccaacaagccaaagttgtgtacatggatatattataaccaatgaggcagcacagaggaggttagagaagacatgaaacggtgcataaagactcttcttgaaaggctaagtacatcccactattgttgggttgattttatggccagacccagttttgaagttagcattgtgaagaatcatccattgggaattgggatgctccctcaaagactgaaaggtgcttaagtgctcactctggagtggaacagatgctgcttttccttaccctttctttcatcctgtatacagtgaacagcatagttgataaatgagaccaaggcatgctcagaaagccacctccacaacagcctggaggctcactcagcacctcttcactcactcactcactcattcaccatgttcttggttctctccaggtcagttatgcctcctccagcagactcctcagcaacaagaatcaattcaagtctttcctccgaaccatccccaatgatgagcaccaggccactgccatggcagacatcatcgagtatttccgctggaactgggtgggcacaattgcagctgatgacgactatgggcggccggggattgagaaattccgagaggaagctgaggaaagggatatctgcatcgacttcagtgaactcatctcccagtactctgatgaggaagagatccagcatgtggtagaggtgattcaaaattccacggccaaagtcatcgtggttttctccagtggcccagatcttgagcccctcatcaaggagattgtccggcgcaatatcacgggcaagatctggctggccagcgaggcctgggccagctcctccctgatcgccatgcctcagtacttccacgtggttggcggcaccattggattcgctctgaaggctgggcagatcccaggcttccgggaattcctgaagaaggtccatcccaggaagtctgtccacaatggttttgccaaggagttttgggaagaaacatttaactgccacctccaagaaggtgcaaaaggacctttacctgtggacacctttctgagaggtcacgaagaaagtggcgacaggtttagcaacagctcgacagccttccgacccctctgtacaggggatgagaacatcagcagtgtcgagaccccttacatagattacacgcatttacggatatcctacaatgtgtacttagcagtctactccattgcccacgccttgcaagatatatatacctgcttacctgggagagggctcttcaccaatggctcctgtgcagacatcaagaaagttgaggcgtggcaggtgcgtccttcacttatatagcaatttgctgtataataaagcagagttgggctgcaactccaggcaagaaaaatagtggtcatttgaaaagggcaatatttaaatgaagccactaaatggagctttggattcaaagtaccttttttaaatcttgagcaactgatttgaacaaaattgatagtaatttgattatctatttaaagccttgagtcaactgttctttagtccagtgattcagaataactgaagtatggtccccaaaagttttcaaatatcccagaacagatttagtaatgagtggggtatttttctaatgtctaaattatcaatattgttcccttgtgagtaagaagtattttttgagtacctattacattccatatactaagtggcataaagctagtattattgtgtttagccaccacttttgccattacattactgacagcctataccaagccacccagcaggtcagctaagcacagcttaggacaaaagcaaatcaaagacacagaaaacaaaaactctttgtaaaaagatttgatattgagtgtttcaaaaagaagcactgaagtggttatcatagaaaaaatcagaacttaagaggagttcccacacttgtttagccttgttttgtatttttgaattacacacaggagagacatcataatctttttcatttcaagagcttatatcctaaatagctgttcgggtcttgcatatgtgccttatttttttcaatcagaccatgtttcacactccttttgtattttccttagttccaaactgacctatcagagagattgcatgacagtggagagggcgggaattcctgaatttgaatggaatgtgccagcctccagctcccccatttcctagctgtgtgatcttaggcaaaccatggctgtaagtcacagtgtctccatctgtgacacagacttaatgtctagcttactttccactcaatgttcttttgacttaggttcatgacattaaatgacatgatatatgtaaaagcaatttgtaaactttcaagctctaaacagatgtgtgattattatagtaggatttcagtacagctctaattaatccatgaattaggtaaaaatgataactagaacacctttgtatacagaacccaaccaccacaaaccctttgggaaggataccaagaagcaaaaagcacacaacttgtatcagtcactgtagagattctcatgaaagacaaggagtgactgtctaagttggtcaaataggccagaatcttcaagttctcagcccttcttatatgggaacctcttacccaaccatcactgttggctaaagtttctaacttctgtggggtactcagagcttctttcttcacacggaacccctaccttgccaagatagaggtgctgtaataaaggtcaggcactctaaagtcttcaggagtgatgatgctaaggtatggggttttaagtaggaggagtaagggagcaatcttctaggtggttgttactattgtcttttctttcttacctctcacgtccaatgcaaggaggacctcagttcttgaaaaaactgcaagacaagagtagggttgaaggaaaaacaggcttcaagggggaaacttggcagttctactcttcaatggctcctcttccagataaggaaataaaatacagatggtcaagaccagaccttggacctgtgagaaaaaaaaaaaagccatgacaggctacagtcacaactgggacttttagttgtgtaatagaaagccctaaccaaattggcataaacaaaaaaagaggaaatgtagtgagtgggtcatgtcactaaaaatctcagaagtgttccaggtacagctaggtattttcatctcatctttctgttcttcattccccagggttagcaattttcagcttctgtagcagcttgaagctaggatctccttacttcccaagatatcctgtaaaagttccagaaaccacatttattgaccattcctaagtcatggatccatccctgatgctagcagtcctccagactacatagacttagagtaaggggggagtgaatctccagtgggaagtcaggatgccattaccaaaaggaggaagaaatagaagcaaagcagccaacattcaaaatgtccactacacagacacttcacccaaccatggcccaggtaaagatatgttctcctgactcttacatggtctggaaaaatctccccaggagacagcacagataggaaaatgggatcagaactctagggaggaatgacatgggaaattggccaaaatgtcctgagtgcttggtgtgagtctcctttgagcctcaggaacccaggctgttggatgggcgttccagaatttgaggtcttggccaggagatgaactagcaattattcattctcattattaagacctatatcttcatcaggaaatcaactagcaattattcattcattctcaatattaagatctatatggaaacttatcacctataatctaatccaagtctccagctggaactccatgtctgccttctctcagttcttcccctataagccaacctgcatgacacctcctcacaaatcactcattagtttttggcacagcatctttgcataggccatagcccacaccagaagggccatcaatttttatctctgctgtcattttccaccaggaacatttaaattgttttcaaaatccactttcccctggaagtcttttcaaatcgtattcccacaacacattttctgatcattctcgcttcctcatttttgatgtttatatacccagcttaagcttccacagctctttaattgactgaaatagacacttattagttaaaattctggttataagggtcaatcacaatttttttcctttctttctccccaaaaaaatatttatcagtcaactcatatgcctcaaaagtagcactagcaggtgatttatgagcatacaactcacaattgcctcctgacctcttcttggagacccccaagccctcctcacatcccttcccagctctctcttcactactcctttgctgtactctaagcttcataagatccagaaccatgcctgtattgttcagtactatgttcagaatgcctgtcgctggaatattcattgaatgaatgaatgagtgaatagcagtctagttgatttgacctgtcaacactacctataggcctttgcagggaaccgtttgagccaacaacccattcttgaatcaatcactgtggccaaggtattctaggctctgtttggacaagctttggtcacgtgcccactatcaagtttgagtggaacatcatgtaagtatgaaatcaccttctttcttctctcaggatgatcatgcacaaggtgtgcttcctactctcctgcacctcacaccaacactcactagtcagaaaacaggcgtgcagccatggtgaagatggaagtcagatggagctgatctttctaggaattcctggtactgctggaagttggggaatgggggataaattgtgaggacagccagagaagatggaagggagataagaaaacatggctggcgttagagaagggaattgggcctggatcttccccatgctcttaccacaggaactgggcaagataatgaacttcattatcttgttcattatctgtgtgacctggccctcattatctgtataagagctggaagtcctagaccagagtgggggggtttctagtctctaatgttcagtttaattcaattgacgctactaagaatgtgtgccaagaggtgatttccatttatgcttataatgagcaaccgtttgactttaaaatcttttaggggaaataccctaaaagaccacaagatgggaatattatggcataaaagagtatgttagcttctaagtgcatgcatgtcctgtatttgcccctcttttagatctatgtgtctttcttggtggtgttttctttgtgagcctgtaagtctctttgtgtctgtatgttatgttctatgttcagatctttttgtttgtttgtgttttgtttttttgaggcagagtcttgctctgtcacccaggctggaatgcagcggcccgatcttggctcactgcaaactccgcctcccaggttcaagcagtactcctatgtttggatctttctactagctttttttgtttctcttccccttcgtttattctttttcctcatattactccccaaataaaataaataatttggaagcatataatattggataataatctcaagtaaaattttatatttcattttaaaaggaactgtcagttcctttttaaaagcaaaagaagccaggggcagtggctcacacctatagtctcaacactttgggaggccacagtgggtggatcatgaggtcagaagttcgagaccagcctgggtaacgtggtgaaaccctgtctctactaaaaatacaaaaaattagccgggtgtggtggcaggcacctgtagtcccagctgctcaggaggctgaggcaggagaattgcttgaacctagaaagcataaattgcagtgagccaagatcgcaccactgcactccagcctgggcaacagagcgagactccgtctcaaaataaataaataaataataaaaagagtgttctctctcgggcagatatctaaattatcttctaacttatgttgctttttttgtggatcaatcattatcaatttaaagattccctgtcattgctcttaggagtgaaatggttttcatctccatcttccctgttatgtgaattaaaggcaagatattatgcagaaaataaaacgcccaaatgcaaaacttgcaagtcagcctgccaaaagaaatattaaagatgtttaaagaggtgacttagagatatgacttggtaagcataataatttattgattataagtggataacgtacaaattttgagtagaaaatattccacactcatgtgattttatttatatacctgctgtgaggacatagtacaatacaattcaggttaggatttgaagtaaggaaaaaaaaatatcatttgagacgagtcttgaagggtagataaaatttgtggatacggagaaggatctactccttggaggaaaggtcacaaaatgtcctgctaagcaaaagaatactgactaaaaaaaaatagtacatagtgtatgatttcatttatgcgatactctgtctctactgacagaaagaaagcagatcagtggtggcctaaggctgcaagtgggtagaggttgactttcagggacaccacagaaccttttgggaaggtggcagtggtagttaccaagcatatacatttgcccaaattcagaactatacacttaaaatgagtgtatataaattatacctcaaaaaagttgataaaaaaaataacggaaagtccccaggtggggaagtcctggctactcatggagatcaggatgtcattcaggttagaccattttcccacttatggcccctcatgttgccacaagcattacacatctctaccatttcatttttaaaatatgtccattttctcaacctacattttataccagttaacctgttgtaactagagataggcaacttaatagatgtctaatttcactcctgcatgtgagtaggtagtatagtgtaatggttaacagtttggaatctcaagccagactgagttggtttaaattttaattgccacctaattgccttatgaccttgggcagtcacttagtgtccttgtgcctcacttttctctctcacctgagaaatagagatcatgaaacttgttaagtttattatgaggataccattacttaatatgcacagagtgcttaggatagtgcctatatactatgtgcagtaaatattagtcttgagtattattcttttgtaggtgaggagggtaagacccagagaagtcagaatgattttcctaaagtaatatatctagctagtaaaaaagctacatctgctccaggtgatctgttccccaaagaggccaaaggagttgctaaaagaatgacttttgccctctgggcaccacatgccttctagctcctgagaggctgccagatcagccagtggtttccaagtgaagacactggtccactgccttgaaccctgggtgttcaacaattgtcctgacacctcggtccttacacaaagagaaagtatagtgtgcaaataattgagagtgcacacagccaaccaggttggagtctattagacatctctgtccatcttgaatattactgtatttcttctttctaaaacagtgcctgcttggccagtagtggtccctcaataaatacttgttgaataaacaaatgaataaagaaagaaaatgggacaaaaataactcctgagaggacagtggaggacagtaacacagtacctagatacaggcacagataagggaggtcagtgatctcagagaagtggtcagaaaactctcacacaagaaaccacagtaatgctgacttcataaactggggctggaacttagctctgcattgttaacaaagtaaattacatgaaggaaagcatgttttggtaaggattttaagagtataaacagggttattgaggcataaagatccagaaaccattaaattttaaattattcttgtatttttaactgatgtaggcctcctaagaatctttatcaggaacaatttattagcctaatttgtactaataaatatgcctaaaagaagaaaagaagcaactttaaaaaaattattttggcctttttatttgtttgcttgtttttgtttatttcagtttagaatttagatcatattttcaatcttactcggcctgattcagcccaattgaactggttagaactcccagtataatcttgtatagatatagtgaggacagacattactgtctgcatctgatcagggggaaagcattcagtcttttaccactgagtatgatgttaactttcatagatgccctttatagagttgagaaagttcccttttattcctatattgccgagagcttttatcaggaatggaggttggatgtcatcagtgctttttctgtatctattcagaaaatcatgtggtttttcttttgtagtatgttattgtagttgaccatcaaaccaacctttcgttcctgggattaatcctacttggtcataatgtatattcctttttgtacatgtatttgtgtgtttgatttactaaaatttggttaagaaattttgcttctatgttcatgaggactattggtctaaagttttattttcttgtaatgtctttgtctggttttggtgtctgggtaatgatgacctcagaatgagtttggcagtattgacttcttttttgatgttctgtaagacttttgtagaattggtattaattcttccttaaatctttggcagcactcatcagtgaagccacctttagttggttttctttgtgggattgttttgttttgttttgagatggagtcttgctctgtcacccaggatggagtaaagtggcatgatcttggctcactgcaacctccgcctcccaggttcaagagattcttctgcctcagcctcccgagtagctgggattacaggcatgcaccaccaccaccagctaatttttgtatgtttagtagagatggggtttcaccatgtcgaccaggctcgtctctaactcctggcctcaagtgatccacccacctcggcttcccaaagtgctgggattacaggcatgaaccactgtccatggcctgtgggaaaattttgaactgaaaattcaatttatttaatggatagaatgctatttaggtatatatgagtcagctttgatagtttgtctttcaaagactttgtccacatcgtctaatttgccaaatttactggcataagtttatttataatattgtttacaatgttctcagactataattataatgtctgcagcatctgtagtgttgtcacttctcgaatttatcatattgtaaatatgcatcttctcccttttttctgatcagtctggctagagatccatcaactttattaatcttctcaaagaatcagcttttggctttagtgatttttctctatatttttgttgtctgtttcatttatttctattctgatctttgtcatctcctgtcttctgatttatttcagtttaatttgctcttctttttgtagttacttatttggaaactgaagtcattgatttaaaaacctttcttttcttataatatagacatttactgctataaatttcactataaatattttattagctgcatccctcaaattttgatatgctgtgttttcattttaattcaatttaaaatacgttccaactttccttttgatttcttctttggctctcaggtttagaagtgtgttatttggtttccaagtttccagtgatttttccaaacatttttctgttatttgtttttaatttaattccattggagtcaacatattttgtttgattttaatatttttaaatttattgaaacttgctttataatccagaatatggtttatctttataaatattttgtgttcttgaaaataatgtatattctgttgttgggatgactgttctgtaaatatcaattagatcaagttggttgatagtactgtccaagtcttttaagtcttttatatttgtattgattttctgcctacttctttcagctaatacgaatgccctattgaccttatttttctcatttatcctcagactgataaaaacctcatcatgggcatgacttgtccacatagtcatgctggacacctacaggtttaatatctattctattaattatgcactcaaaagacaaggtttgagtatccactaaaatctaggccctctacaaaccactggagatacagaaggaaataaggcagttcctgctttagagaagtttggtctaatgaagtgtgggtacaacattcctagccacaaagattccagagtgcttccttctccagataagatgtttacattgccatctcttccctcctgcctactctttatctccctgccacatccgaagttggacttgccatgtctcattactcaactcgctacaccaagtatcctagaggctaccttgttatcaaggatcctgccaactacaaatgtcggtttcactaattaattcatatttggatttttaaagtccttttccatgccttcttttttgcaacagctttataagatgtaattcacatgccatacaattcagtcatttaaagtatacaattaagtggcttttaatacattcacagttatgcaaccataaccacagtcaattttagaacattttcaccacatcaaaaagcaacctcatatcctctaactgtcactccctaggcccccaaagccccagtcttagacaaacactgatctactttctgcttctatacatttggactttcctggatatttcatataaataaaatcataaaacatatgatcttttgtgactggctgcttcttccatattgtaacatgtatcagtacttcattcctttttacagccaaatagtatcccattgtgtggatataccacattttatttatctgtttacccaattgatgaacatttggattgttcccacctttggttgttatgagtaatgttgctatgaacatttatgtacaaatgtttgtgtggacatatattttcatttctcctaggaatgcacacacacacacacacacacacacacacacacacgagtaggattgttgggtcaaatgatgactctatgtttaactttttaaggaactgccagacgttttttccaatgtggctgcaccagtttacatccccaccagcagtctatggaggaccccaagttctctacgtttcaatcagccctgtttcttatctaatccaatactttttaatgtgaaatctagcctcttttttgccttggctcctctttacttatcttctgtatttccccttgttctctagtacatacatgattcttgagaaattgatctctttactggccccataacacatcatgtttattcctaatgtgatatctttgcccatgctgttccactgtttttaacaccttccctccctctgtcctttgccagccaaaatatgcctgaaacctgcattgatcatttcagcccttttaaatttctatctcctctaagtttctctgtacttagagatgataccccatcagttagcagttaactatattttatcttgcactgtttactgcttcattgaatatttatgtcgtgcattttatcccctaatccatatgaaaactccatgaggatgggatgaccatatcttgtagttctgcagcccagttcagaacacacagtggatactctgtaaatatttcctggttgattgattccaatattataaaattccagtcttgtatttatcatgagttttttaatgactacttagaaactttaagaaaatgatttttgattgtttctcctttgaagttaggattatggtggaaatctccagcccatgccaacaataatgcagaagacttgtagccagggatgagctttaagtcacttgtctgaccagtgtgaaagatgaccagctaattatgaaaggatcttgtgcagttcccctccccacttctaccctgatgctgggagagttccactgcagagaactagtggacaaaggagaaaagcagcttgttgcctggcatgttaagaaccaaggaactgaaacctaaataggaagaagaaatgtatgctaactactagagctttaccacaatatatgcatttcaataaggatgtattactgacctctaacaaacatttgccatggacactgtaagcaatttatattagaggtgtaggatgatgttgtagaaaagccttgtttaacccgtagctccagcacttagtggctatatgacttttgcaagtttcttgacctttctatgcctccgtttcatcatctagaaaatgaagatactaatagttctaatccatagaggtgttgtgaggattaaatgatatagtatgtattaagtattagaacagggactggcacataggaagtacaaataagaggtagtttcctacctcttcacttttctcatctccttttccacacacacagacctggcatggcatgtggacaggatagtggaaactctatgattaggatgaaacatttgcactgacaagtcatggtaggtacatgggaccaaagtatggagggctttggaagctacctgaataagtttgaagcacatttcatctgagtcatggtaggtccccagcaggaagtgggaggggcacgattacagcatggagaaggatgatggccatgtcagaaaggcccccaaactgctaagagcaaggtttcgagcaatgtgggagtgagggcagtattaaagagcagaagaactgcatgttcctctgagggcaagaaggatgtgtcaggaaaaggatgtgttggggtagagacaaaaggatgtacaccactctgggtaggaggaagtcaggtcaccccaacagcgaggagggataggaagcggaggtggaggtaaaagaaaggaacacatctagaacacctcctctgcactgacggccttaaggcctcagtaaaaatgaaggcaaacataaggttgtcaaccatcagagaaggtgggaaggctcaggagaagacgagggacacaaatccttagtaggagccattctccatcttttttgaggatggctcagcagctctggttgcagaaccaggtagcagggagtgagggatccctctccttcatagacctgagttgaaagtcagggcagtcagggcctgccaatggagcagcgttcacagactgcaggttaagggaggcacccagggtgctatgcctgtgagcacacatagtctgtcatggactctgcccccaagcatgtcttggagctacttatggataaatccaagtgactcctctcctgtatttaatattccttactataaataaatgtttgtctaaaaataaagttaatacagatatcaattgttaagaagcagtgccatctctggagtggagtgggacaggagaggtactggctcagtccacgtgtttgtcacacatatcagaataatttggcctcagaaaggcctattaaggccattcattagatggactcagcccaaatgttgtcccagtgtgagattagacgttggattttaagtaccttaaaaagaatgataaatggctgggcgcagtggctcatgcctgtaactccagcactttgggaggctgaggcaggatggtcgattgagcccaggagtttgagaccagcgtaggcaacatagtgagaccttgtctctacaaaaccaaaaaaaaattagctcagaatgggagactactggagattcaggaggtgcagtggaaggtgtaccctacactcacaggctggaccctgccttactctcacgtggtgtcacagtgacacaaggctggcctcacatgaaagataagtggctgagtgcccactgcctcctcttgactgatgtcaggagcatgtgaggaagcagagccaggagcccagcgatgctgcagtagagtacagcaattaagagcgcaggattgtgaccctggacgagatacttaaagttttcagtgcctcagtttccccagaaataaaataagcttaatactatttgttgtgaggatttgattagataatggatataaagtacttagggtcgtgcctcaatggtagtaaaatgactgatatctaaaatgtttacatgacaacatgtggtatgtgttagtaattattatgatgacttttttgtgcaaaggctttgtgacatataaaaccttataaaaattcaaggatttgccatgactctgacaacaataatggccgggctttgcccacagcctcatctctttcttccttcaccccactctgtgaatcttggcagcaaagcacttccacagcagcaggatcataggaaaggaaagtgcggagaataagagcactcagtcatttctcctgtccttccccaatgcccagctcagaagatgccagggatggactctggcttataaatcctgcccctcctggggcaccaccaggtgatggcacacctgcagaacctttgacctggccagttgccaggtgagatgtctccctttcctttccccatcttcaagaaagtgtttcctaccctaatcataatttgaataataattaaagcccatggcttaacagggctgctgctaacaccggcaagtactttggtgtgaattagaaaaagctgtctcttcctcaagtcacgttcctcccactttgttggaacaagatagtctaccgttgttgtgcagggcacagcctacctaattagttctatgtggcagccctggggcttgtactcattctttgctcctctttaggtcctgaagcacctacggcatctaaactttacaaacaatatgggggagcaggtgacctttgatgagtgtggtgacctggtggggaactattccatcatcaactggcacctctccccagaggatggctccatcgtgtttaaggaagtcgggtattacaacgtctatgccaagaagggagaaagactcttcatcaacgaggagaaaatcctgtggagtgggttctccagggaggtaggtgctgtccatcagaaaaccagatgtctccaccaggggcaggaaactgtgctgggctttgggagggcctttggtttccccactggacttccaaaataaagagtccacttccctgaactctctggcctttgcaatcttggggctccctgtgaaatccacagtgtttagtgtaaagagaagaatctccagaacctgagccccatgccttcctactgtattgaaacagtttcatttttcacaaatatgactccctagctagtcacaaagtttccttggctaaaactttccctaaccagagcaaaatatttaagcaaatgtaaacatcggtcaagtcagtggctctcagctcggccaagggcaggggagacaagttttagagtggaggggactgcttttgggttgtcacaatgaccaggaagtattaatggccttcagcacttgggatccagggatactaagtgtccagcatgtgtgggacaagcttacatgacaaagaattgatcccgcctcaatggccagtaacagccattgaaagacactggagcccaaaatggagctggatgttttcacctgagtcatttggtgttgtcaccaccctcacagcctggacagttcacacagaggtagtgtgacagcccgggctgctgaactgtaaatcaaaagaacaatttattctcctcctccaggagacctgtaacaaagaggaggatgcttgtgtgtctgagtatcactgcagctagaagcctgttaataaccagaagcccacccctcagtcaatttgcacttgaggaagagaaacgtgatacactggaatgatgaccattctatgatgtttgtgtcctagaatatagcaggctgctaagaatccaggtcctctgtaagaacacagatcctagacagggcatcctcttaactctcccaggaagcctggataagacccaccacatttctatttgcatttgccttttttattatcacctttgagcatcttggaccacttttcttttttttttttttttttgagatggggtctggctctgttgcctaggctggagtgcagtggcacaatctcggctcgctgaagcctctgcctcccaggttcaagcaattctcccacctcaccctcccaagtagctggaattacaggcgcaccaccacacccagctaattgttgtatttttagtagagacggggtttcaccatgttggccaggctggtcacgaactcctgacctcaggtgatccaccctcctcagcctcccagagtgctcagatgacagacgtgagccaccatgcccagccatcttggaccactttttataacataaccaaagactcgcttcgtcttcttatcaaatgcttcttaggttgacaggttcctgatgagatgctacaacttcactgttacccagtatgtagatggattaccactgggaaggtctcccatagacagtgaatctcatccacagtgtgccgtttttaatagcttacaccccagagggtgggttcttaattataaatatgtcatgacttttccagatggagatttgggggttccagatgttatattcctctgtccactaattatacctttgtctaatttatcacgtattttcactgactggagtctaaattgatcagctatactgccacctgtttacccctgttggatcatccagtttatctttcacccccattaatgcatagaattgaattctctaatggcacatgtctctccactgcagcagggagctatctcctgtacagttctccatagccctaactgtcctctcccaggctatgtacatcatgggcttaaacattgatagatgaataacacagggaattctcattaattcagtcacttatgttcttggaatagttgacacagttataagttaaatctaatttttttccatagaaatattacctcaaacgtagcacacaatggatactcaacaaatcttaggatctactctattattttctgtgctgttgtggaaatgaccacaaaaataccacctatatttaactataaattatatattagtaacttccctatgtatttcacaaagttgttattgagatcaaatgagatcaaggatgaaaagcgtatgataaactgaatcatactactaatatataaatgcaaagtattaatatggcattatacttaactgatgttctcaattttcttacaaatgtagcactaaatttagagctagatagatctttaaagatccttgtatccaagcttccaatttgaagttgatgacactgaggttttaggatgcaaaggtgacttctcaggccaaacagatggtcagtataaaagctgagactagaccccaagggccctaacttagacctcagtgctccattccctacactgtgctgccaataattctttccttgttttgctacaacaaataagaagtaaaagagacaccttaattagggtcttggaattcagatgagcttccttggccagaattggacaggcatctttaataagactgttgaggaggcttggagatacttgactgctttttggaaaaatggatctttccggtggctacctcagcccactcctgtggtgataggatttctctttagctcatggttgctgaaggatgcagtaagcagacccagatggagacattcttctaagccttgactggtataaagcagagtttggtgtagtgaaaagtacagactttgaagactgacctgagcgcgaatctcagctctccagtcaagccattgtgtgaccttcagcctgttccttaaccattaagaagaagagaaaaagaggcaaggcagacattcctataggccctcgttatttatactcctctttttctttaaaaatagaactctattttagctagacacatgactacccagattcaagatgacatttttcagccttcatttctactaagtgcgtccccatgactaaatcctagagaatgggatgtaagtggcagtgttgtgggatggcttctgggaaccttctttaagaaagtgcttgcaagtatcctttgctctcttcttcatcccttcctctatcttgcctcctggaaaccaaatgccactatcaaggactatgaggcaaagacaaacatgtcagaaccaccaggtagaaagagtctaggtgtccaacattatggagtgctatatcactctagaccacatccctagacatttatatgagagagaaatacagttcagtcttgttgggagttattattttgagatttttggcactcacagcctagcagaaaccaagaaggaaagctactaaatttattttgtgatgataatataatcttgataccaaaaacagatagaacaatacaagcaaagacaattataggacaatattgtttgtatacgtagatgctcaaatcctaaataaaatatcaccaaacagaccagcaatgtataaaataaacatcatctgctagtagagttagtggtgaatgtacaggaacgtaatgatagccaaactttacaaagttcataaatgtagcttattacattagcagaataaaagataaaagttctgcaatgtcagtagacacagaaaaagtatctattaacatttaacacctctcaggttaaaaacaaaaatttttaacctctcaggttttaacctctcaggttaaaaacaaaaatttcattaatctaggaatagaagggaacctcactttaccttgataaaggatacagcaaccatcattcttttttcattgtatttcttttaagttctggggtacatgtgcaggatgtgcaggtttattacataggtaaatgtgtgccatggtagtttgctgcacctgtcaacccatcacctgggtattaaacccagcatgcactagctcttttccctaatgctctccaccccactaccctttcccaacaggccccagtgttgttctccaccctgtgtccatgtgttcccattgttcagctcccacttataagtgggaacatggggtgtttggttttctgttcctgcaaaacgtaattcatcacataaacagaactaaaaacaaaaaccacatgactatctcaatagacacagaaaaggccttcgataaaattcaacatcccttcatgttaaaaactctaaataaactaggtgttgaaggaacatacctcgaaataataaaagccatttatgacaaacccacagccaatatcatactgaaaaggcaaaagctggacgcattccccttgaaaactggcacaaggatgcccgctctcaccactcttattcaacataatattggaagttctggccagggcaatcaggcaagagaaagaaataaagggtattcaaataggaagagaggaagcaaccatcattctttaatggggaaaatttagaagcattcctagtgtgggtttggaaaacagggcctttagctttcattgagtgatcaaatgggttggcaactcaaggactgagagcacatctctgaggataccttgtcaccatagttgaagatgatgatgtgagttgtccttttccctcccctccccttcccttccctgggtcatgagagtcttggcaatcatcaggtccattactgcctttccattcctcattcattagaagataatgtcaatcatcttctgttcaagttttttttaactcctttgtcaagccagtcatttctgctagaaacaacgacagctactttactgctttctgtgtttgtaagacatcttacaaagtagtaggtagaggggagacccattaaatagacattatggaaatagtaaaagccctactatgtattaagcattactccaggctttgtacctggggttacaaagatgagtgagaagtgctctctacctctaagatacatatgctgttgcaaaacggacttcattcttatgatacatttcttgtctttgaaacatatacattgttagatagtaaatgactaataaattcctagaatgaataatcaattagctggtgcaaagaatgagatagaagcaggacttcttgaaatggtgaagcaatgataaaattgaacaaaactggacaaaaaccactgaagaacctggaagttaaccagaagcacacaacaaaaggtgaagggttttgtttatttgttttgttttgttttgtttttaacaaaaactaatgaaattctggtaagaacactggtagtctatggcattttagcctgggcctgctcttcagttgtttctaataattcggttgttcttttgggttttctttatggcaaccatatcatctgcaaataactacagttttatttggtccttttcaaaatgtatgcacttatttttcttgtctgattccactagctaagacctccagtgcaaagttaaagagtagtggtgatagtggatatccttgttttaaatggaaatacttttaatgttttctctatatgaatgatgtttactctaagaggttttttgttaccctttttcaagttaaagatatttcttcccactccttttttactaagcttttatcaatagtttgtgttggatttcatcaaatgctttttatttatctgttggtgatcatatgattttttttctccattaatttgctaatgcagtgaataatacttatagatttgtctaatattagacttttttgcactcctgagcataaacccaccatggtcatgatgcattttctttcttatgtcctttgagtctgttgtctagtgttttagtatttttcatctgttttcaagtagtagaaagtagtggcgcttttcccagatcatcatagaatcccaagggtgtgtgtctgtgtatgtgtgcatgcacatgtgtgtgtgtgtgtgcatgtatacacacacactttcccatagtcatctgtccctttcacagatatcagaaccaaggacctctggacctccctttgcctggaatgggcccaacgtctgtcacactgattcttgtgcccaaactcctccctcttacatgttttgaagagacagtagggctggcccctgaccctacaactacagccactcacctttgtgctgtctgtcctccaggtgcccttctccaactgcagccgagactgcctggcagggaccaggaaagggatcattgagggggagcccacctgctgctttgagtgtgtggagtgtcctgatggggagtatagtgatgagacaggtaagggaacccctcttgggcactgtgcagggcttggtccacttcggaggcctggggtcagtgaagcccatggaagggctgggctgagatggtgctttgcacagtttctcatttaacaaaggtatatctgagcatcacaaaatgttgggcatggaggtggaacagaaaaagaatgttagatgttcttttaataccataaaagataacaatacctattacacatctttctcttacttcatattgtcggccaatatatttcctttttgttagagtttagtggccctgcatggacacagttatgtctgctccagactccagagttaataggccatcatagaattgcctgctgggtgcctggcactgaatttgctatcttacttgtgtttttcctgtttctcaggttatttttaggtgggaataataattaaacctatcctatagaattttgagaattagatgattaatattggtaatgcacatggtaagttctagataaatatttgttaaataaaactttggcatattagaagtactctataaatattaactatagttgatattatctcatgttatcctcaccccagtgatggggttattgctgctcccattttataaattaggaaactgaggctctgagaggttaagaagcttgatcaaagtcacatcactagtaagttgtatggccaggattccatccagatctctaactccaaaacccatgctcccttcactgcccaaaactgcatactgcctgggagttagcagagacttagtaaacagttgtcagttgaatgagtctgcagcctccctcatcaaaaagctgtggatgtggagtgaggaaagcacaggtcatgtgcatgggatactctgccttgatctaaaaggaagtctgctctggcatgtctacaaagcccatccatatatccaaaataaatcactctccatgtgagatgtcagatatgttcatttgcctcactagagtagccagtttactgcccatatgtatcccacaacattatgttgtaaacctcaaatattacccaataatatttaaataaataaatcaggctaagcttgaatcattctgcgaagagttgatggaccatgctagacctctggtgtgcagggcagccacctgtccagcaaggttgatcattccctgccatcagaagatagtgttaagtgaaacaagggcctcacccatgtcatgtgcaaagggaaaacaaactaacaatagaaccatcagagttacatgaaattaaccatgttattaaacatgtcggggttcagcatatttttgataatgtaaaaatcagaatgatttcatcaaaatggagaaaatatgtagtgaccacatccaaaaaactatgtattcccaccaccacatgtacactcacacattttagtctgtgccacacaataactcactcttcactgggacattttacagatgccagtgcctgtaacaagtgcccagat

SEQ ID NO: 35 - DNA, 200002 bp, Homo sapiens
cttcaccagcagtgcgcattaaagacacaaatgaattttaacataaacaagtcaaagttagaacccaggatctggggctctcagcctctaaccatccatgtatgtgaggtattgaccctagttttcagtgcattgcagaacatttagatagcctttggacccattacaagctctgactaagagtttaacatacagtctggttaaaattaagaactccacccaccgcccccccgcattgtcatctccaacagaacagacgatggaatattcatttctttttttcttttcttttctttctttttctttttttttcctttttttcttttcttttttttgagatagagtctctctctgtcccccaggctagagtgcagtggtgtgatgttggctcactgaaacctcagcctcctgggttggaacaattctccttgcctcagccttccaagtagctgggattacaggtgtgtgccaacacagctggctaattttttttgtatttttagtagagatagggttttgccatgttggtcaggctagtcctgaactcctggtctcaagtaatctgcccaccttggcctctcaaactgctgggattacaggcgtgagccacggcacctggccctgaatatttatttttaaggtttctgttcaaattgcctgcttgtgggatggggccctgaacataaccctgcttccacacagctgcttcaactctgtcagctcttctgtttgcttcatgttgccctccttctcctaggacagcttcctcctccatctcccactcccactttgctcttccttgttaggcaaaaatgactccaaagcccgtatccccaaccgcctcctttatctaattctcacataccaagccaatatttcctctgccttaaatcaccccagggccaagtagtggacactagagacctcccctagggcccagagcccacgaaaactattcacactatccagtcctaaacttgtccaccgtgcctcgcccaatggttcccatggaaaccacagtaaaggctctgggccctgcccctccaccttgttccttctgcctcccgaccagagaccaatgctggttcttcctgatgtggccctgcagggcatggcgtgcccttcctcttgagaactgtaagtaacaagctctcctttcaaaggtagctgtctctgtggctgtcactttcccaaaccctaataaggaaaaatcccaggcatacagtaaagacacaccccaaatcaagagaaactgcaagaaaattcctcctggcctctctacctcccatgccacgaggctgcttctgcaattccctttgttgatgggaaaccctccaagtcactttggcattagaaatacactatggggtacctggtgatgtggatcttgggaatcctgcttaatgtctgtgcccaccccccttgtcttcctctggcattgtgatctgacttatttatggggccaccacttgaaatattgggtgcagccggcatttccagaccatagcagacacaggcctccctgtctgctccagacaagagggcaagcatggaaatcaacattatgcccccttgtaagtcagtgcagatccccaggattcccttctgggcccaagaggattttcttaggaaaagcactgattcaggcaaacatcccagagtaaggagaacatggctttcttctcactgtaaattactcctcaccaaagaaatcactcccctagtttccagctgagcaagctgtaaatcctgtgcaagagaaggcaatttatggggtgttctctgattcttcccacagtaacagactgaaatataaggcatacatgtcaggctggctttcaccatcttgtccttgcccttaggaacaggcttggattcatgagacttgagacaaatcaggctgcaatttcagatcacaagtgaggtggtgctgactcttcccattcagcaggatgtcctggctttaattttaatgtgccaccatagctcattctaggaatgaattgacttggcatgggaccggccatacagagaactaactgcagccagctgggatgtgtttgaaagtgggatgcctcagagtgggataaacaagtgtgtttctgaagaccctttgccagcccacggatgcccgctctctccatcagcaccacagacccctacatgtggcagctcctgtctccaccatggccaggtggatgcttcgctcctatcagtaacgagcccactgtgtctgtccttccaggggctaccttacaaacacctgatcacccaccaccaggagcccccacatcgctacctgatcagcacctatgacgaccattacaaccggcatggttacaacccggggctgcctccactccgcacttggaatggacagaagttgctgtggctgccagagaagtctgactttccccttcttggtacctttataattcagggtattcctctgcgttggtctgtaaagttgcacagaccaacggagctgtacctgcctcatgcagaaggagccacacaggtgaccctggctccaggagagcagcggatgacatagtaggggctgagttctattgtaccctcagggctgcctcctgtcctttccctttgacctggggtaatcttggctgtgtaatgaagccatcacctgtgccccatggtggcgggcttagagcacaggtggcagggagcaacatccacgcatccttcctcccagtcttatttactacatgaataatgacaatatttcccaggtagtgctccctgctgcaatgataacaaacactgaggaatttctggactcggggagttgacattccaggggggaaacagataagacaccattaaaaagtaagaacacttaagatcacatagataattttagacaggagtgtgcgctataaagaaaacaggtaatggagagaaagtgaggtggtgaatttgtgaacctcctttggttcacaaattcctccttggaaaagtgaggggtggtctttgttgaggagatagagttgaattgggaagaagggagccatacagggattgagggggaggacattccagaggaaggaacagtaaatgaaaaagttctaaggcaggaatggaggaggatcatgtaggggttcatagggcacagtgaagggaatgaaatttgtcctatccacaatcccaagacttggaatgcacttttgtaggagagtgccttgatgtgatttacatttcaagccacgtccacactagtgaggacacagagcagtgccagctctttgtggtcctaccttttgatgcaaagggacacaggtcagaggatgagctgctggtcactctgcattacttttgcatgggattcttctcaacatcactctcagtgcacacagcttccttcccgacaggggtgggacaattactcaggaccagcgaggccacgcacaaccacaccgtggggctgacttttccaaggcccccgtggcagagcctgatctcccctgagcacttgtgatgcaggtgcaccttgagaccgccaggggctggctgaaccaatgctctctgcaaggctcttccctgtgggcctctgccagccttggtccctgacagagcagcctgggaaaatctccagggcccctgctgcccagtctcgtggccattggccatttagagcaagactccttctgtaagccccattcaactggaccctggtttctcttgcagctccccctacaaactatggactctatgagcagctcaagcagagacagctcacacccaaggctggcctgaagcagagcacttatacttcatcctaccccagaccaccgttgtgcgctatgtcctggagggagcatgcggtcccggtccctccccatcgcctgcatcctttcccacacttctgagagctgccaccccaggagcagctcagatagaatcagctggagaccacagcatcactggacttgccagacaacaagtggcgcagataaactcagagtacgagatctggcccgtcaaaggtgctctcagaatcatcatctgcatttggcggtacctgtcccccctcaaaacccacaggttcctttcttttccatccaacaattaaagatctttgacactattgcagggctatgtacgtgcacaagacagattcagactgtcagagaaaacaggaagggcccttaagttctaccctgttgtttcacaagaggggaaactgaggcccggagaggtaatgtgacttgctgaagagtctactcccatggaggaaatgaatctgatgatgaaacccatcatgaaaactccacagaatgactgaatgtggttcccaggagggcagtgctgcagagctggcaatggggaaggaccccagcttgtctgtcattgccaaggcagaggaaggcgtgctctggccccacggggctcagaagaaggggaaaacacatggcatttcctttgtctctgagctcgcaaatctttgtgtttttttttttgtttttttttttttgagacggagtgtcgctctcttgcccaggctggagtgccgtggcacgatctcagctcactgcaacctctgcctccagggttcaagcgattcttttgcctcagcctcctgagtagctgggactacaggtgcgcaccactacgcctggctaatttttgtatttttagtagagacagggtttcacaatgttggccaggctggtctcgaactcctgacctcgtgatccgcctgcctcggcctcccaaagtgctgggattagcaggcgtgagccaccgcacctggctgagctctcaaatctttatgagcctgggcagaggggagaacctctggtgagtgatttgggagagagggtggatctcctagcagaagaactcaggcatggtcctcgcccaggacaggggtccacaagtgtgcatgctcagtgctcgcacagagctgcctctttgaagaaattccagcagacacctttggccctttgcatgcttggctcatgggcacaggtgtgttttgtcagtgattttgtactgcacaccaataatatgactcccagtatgggagcctgagtctctgccattgttttcacaggatacctgctggcctcaggccacctaccttagggtcactttggcacctactaagctccttccttagtcatccaagtgtccatgtaaggacactgtcttccatcccaactgaaagtcagagcctgacacaggctaagtcctctatgtttgttggatgagtgaatgacaggagttgaacaaatgagttgaatgaatgaatgacaggaggaggagccagggggtgcagaaaggttgcacctaccttagggtcactttggcacctactaagttccttccttagtcatccaagtgtccatgtaaggatgctgtcttccatcccaactgaaagtcagagcctgacacaggctaagtcctctatgtttgttggatgagtgaatgacaggagttgaacaaatgagttgaatgaatgaatgacaggaggaggagccgggggtgcagaaaggttgcacctaccttagggtcactttggcacctactaagttccttccttagtcatccaagtgtccatgtaaggatgctgtcttccatcccaactgaaagtcagagcctgacacaggctaagtcctctatgtttgttggatgagtggatgacaggagttgaacaaatgagttgaatgaatgaatgacaggaggaggagccagggggtgcagaaaggttgctgcaggagacagctgtgggatggagtggagctggctgtcctcacacctccaacatccagcctttctattgagcatccattgagccatgtctgggccaggccctgacctcacagagcctcagtccagcagtcagggaggagcatgaggtaaatggctgcaggacagagaggtgctgcagctggaggccctgggggacagcgatggattgcgaggagtgagggagacccaggatatgctaagcaggggcgtctaatcttttggcttccctgggctacattggaagaagaattgtcttgggccacacataaaaaaaatgaacaggggctgggcgcagtggctcatgcctgtaattccagcactttgggaggcctatatgggcggatcacctgaggtcaggagtttgtgactagcctgtctagcacagtgaaacactgtctctattaaaaatacaaaaatgagctggcatagtggttcatgcctggaatcccagctactccagaggctgaggcagcagaatcgcttgaacccaggaggcggaggtttcagtgagaccagatggtaccactgcactccagccttggtgacagagtgagactccatcccaaaaacaacaacaacaacaacaaacttacactaacggtagctgatgagctaaaaaaaaaatcgcgtaaaaaaaccccataatgttttaagtaagtttacaaatttatgttgggccacattcagcctgcaggcggagggttggacaagcttgtgcgaaagtaaaggatgtcatgagagcaacgggcaggggttgacggatgatgaatgaagacctggcctgcctaggtagggccagggagaatcaggtaggtcaaggccagaaagctgagggagattacccagctgaagggacaggttgggagggaagagagggtggcttgggccatgggggcagcacgtttgaagtctctgacttgggaagaagctgagcaaattccttaaaagtccagaaagaccatgcattggtctcctattgctgctggaacaaaataccacaaactcagtgccctaaagcaacacatgtttatttgacagttcttattataaatgtgaataaatgcacatttattcagaatatcacaagctcagtgctttaaaacaacacacatttatcctcttgcagttctcttatgggtaagagtctacagtggtccccagggctgcgttgcttctagagggtctggggcaaattgttcccttgtcttttccagcttctagggcacatcaccgctcccatcttatggcgccatcagcttgtcgagagccagcagtgtagccttccttcctctctgtctccccttacaaggatccttgtgaccacactgcgctccctggataagccaagataacccctttctcaagatccttaatttaatcacacctataaaattccttctgaatcttaactaacatagtcacagattccagaatgaggatatggacattctaggagggacgaggagagaagagttctgtgcacttgacacctgctcagtcactgacccctccccccacccccaatgaatctggtcctttccaggcagctgggatggtcaagggacaggggcagggggaatccgatgagggccacagactgtgactgccctcacctggtcagcactgcttcaccttccatccacacgtattaaaaagtcactgtgaatgtgagagtgactagaaactcttgagcaggagtattgttttcaaggtccacgatgcaaccagttacacaagatggggtgcacaaccaatagcagaggctccagttgaccagggcggaggctctccccagctgttcccaaagcaaaatcaagcaggtgagagtctatttcctacagtcctgcttcaacccaaccagtggttctcaaacccaaccagtgagccacattagcttcacctggggggcttgttgaaacacagatgctaggcccatcccctgagcttcggaattagaaggtctcaggtggggctgacaagctggaattttaatgagttcccatgggaagctggtgctgctggcctggggactgaactttggcaaccacgccactaggctgagctagtctaattcttttttgttttttaattaatttatttttgttgatacgtaatagttgtacatacttttgagatacatgtgaccatatgatacatgtgaccatatgatacatgtgaccatatgatacatttatataatcaaatcagaataattgggatatccaccaccttaaatatttcttttctttacactaggaacattccaattattctcttctagctattttgaaacgtacaccaggtcaggcgcggtggctcacgcctgtaatcccagcactttgggaggccgagatgggtggatcatgaggtctagatcgagaccatcctggctaacatggtgaaaccccgtctctactaaaaatacaaaaaaaaaaaaaaattagctgagcgtggtggcgggcgcctctagtcccagctactcgggaggctgaggcaggagaatggcatgaacccaggaggtggtgcttgcagtgagccgagatcacgctactgcactccagcctgggtgacacagtgagactctgtctcaaaaaaaaaaaaaaaaaaaaaaaaaaagaaatgtacacctaatgttaactatagtatccacactgatctatcaaactccagttcttatttcttttaagtgtatatttgtatccatcagccaacctctattcacccatccccctcacccaactctttcccctctctggtaaccaccaccttattctctatcatcatgatatccactttttaagctcccatgtataacgcatgagaacatgcgttatttgtctttctgtgcttggattattttacataatgacattattttacgtatgattatttgaacataatgacctccagttccatccatattgctgaaaatgacaacatttcatttttaatggctgaatatttcattgcatagctatatgtaccacattttctttatccattaatacattcatggacacttaagttgatttcatgttttggatattgtaaatagtactgcaataaacatggtcgtgcaggcatctcttggatatactgattttctttcttttggatatatgcccagtagtggggttgctggatcatatggtagttttagattttggagaacctcaatgcagtttctatatgggctatactaattaatttacatttccatcaacaaggtacaagagttctcctttctccatatactcatgggcatctgttatttcttgtcattttgataaaagccattctaactgggataagatgacatgtcattgtggttctgatttgcatttctctgatgattagtgatattgagcattttttcatatgtctgttggccatttttatgccatcttttgagaacttttgctcatttaaaaattggattggatcatttgattttttcccattgacttgtttgagctccttgcatattctagttattaatgccttgtcagatggatagcttgtaaaaatgttctcccattctgtgggttatctcttcactttgattgtttctgttgctgtgcagaagaagctttttagcttgatgtaatcccatttgtctatttttcctttggttgcctacgcttttgagggcttgcagaaaatatctccgccacagccaatgttctggagcattttttcaagtttttctcctggtttcataatttcaggtcttagccttacacaaaatatgtttgccccagtcaatgttttggagtattttttcaagtttttcttctggcttcataatttcaggtcttagatttaagactttaaaccactttgcttttttttttttttttcttttttgagatggagtcttgccttgttgccaggctggagagtgcagtggtgtgatcttggctcactgcaacctccacctccggggttcaagcagttctcctgcctcagcctcttgagtagctgggactacaggcacatgctgccacgcccagctaatttttgtatttttagtagagactgggtttcaccatgttggccaggatggtctcaatcttctgaccgcatgatctgcccacctcagcctcacaaagtgatgggattataggcataagccactgcaccggcccaagactttaaaccactttgacttgatttttgtatatagtgaaagatagggatcgacttccattctgcacatgggtatccagattttccagcaccattgatagatgagactgtcatttcccagttgtatacgggcttactgcctttgtcaaaaatgagttggctgcaaatgtgtgaatttatatctgaatctgctattctgtttcattggtttatatgtctatttttatgccagtaccatgctgattgggttactataggtttgtagtatatttggaagtcaggtagtgtgatgcctttagctttgttctttttggtcaggatggctttggctattcagggtctgctgaggttccatctaaaaatttgggaattatttttgctatttctgtgaagaacgtcattggtattttgataggaattgcactgaatttgtaaattgctttgggtagcattttcattttaacgatattaattcttcctatctatgagcataaaatacccttccattttttcttgtatcctcttcaatttctttcaccaatgttttatagttttccttgtattaatctttcacatctgtggttaaataaattcctaggtgttttatattctttgtagctattgataatggaagggatttcttgatttctttaacaatctttaagattgtttgctgttggcatatatgagtgctattgccttttgtacgttgactttgtatcctacaattttactgaaacagactttttgttaaagtctttaggtttttataaatataagatcatgtcatctgtgtacaaggttaatttgacttcttcctttccaactaggatgtcctttatttctttctcttgccttattgctctgcccaggacttccggtattatgttgaaaaaaagtggtgaaagtgagcatcccagtcttgttccagatttcagaagaaaggctttcaatttttcctcattcagtatgatgttggctgtgggtctgtcaaaaatgcccttcattattttgaattgtgttcctctatacccactttgtggaaagcttttatcataaagagttgttggattttattgaatgatttttcagcatctattgaaatgatcatatcatttcggttcttggttctgctaacatgataaatcacatttatttattgtcatatgttgaaccatccttgcaccactgagatgagtcttacttgatgagtgtaaatgacctttttaatgtgttactgattttggatagctagtatttttagaggatgtttgcatgtgtgttgatcagggatactggcctgtagttttcttttttggttgtatccttgtctggttttggtatcagagtaatgctggcagatcgtgtgtttctattttatttgtaaaatttctttggaataacagattgtgcagtgaaaataaacatagtaaacattagacctgatgctctggaccccagctctcacacaagcctctgactgtggaattttattacaaagcattaaaataaacagcactttggcagggactaggacaaatgttgggtgaaatgagacagaaggaggccgatgaccccaagtcccaaatgagtagaaaggaggcttttatcagctgggagctatgggagaaccccaggcccagtgggcattgctgcaatgacctcatggtatgtatgtgtgtatgtgtgtgaccacctagaaagtcacagctctccaggatgagctggccccatagcagagaaaagtaaaacccccatatccctggtaggacaaatctcccatgagttcagcaagaagacttgggatctgtggacaggagggcacttggtaaaatccttcatttgaggttgatgtgaaaagttgaactcaagatcctgaggccttatgtccttcccactcccccacagggctcctgctgagccagccctgactcccagatgcaagagcccagggaggagttgggagagaggaaaacctgctgggacctcagggcatggaaggagccctggacctttctcccagtgatgcctcccctactgtcaagttcctctggccctggagcttccagggacccctgcatcctttccttcctgcagccctgcctttgccaaagctccatgcatttgcctccaagtgggtccccaaccccaggctctgggagctgtgaagaggctcagggttcctgcagtctgcaggaggaaaccttgctctaaatgggcctgtgtgggttctgggatcccttcctgcacagggccacctgcaggtcccacagatgtatcttccctagaagagccagtggtgatgggcgaggacccctaacctgctcccaaaccccacatccaaaggagagagagggatcacctgaagcacagaccaggggttgggtcctggccccactgtctcctcctgatcccagaggccaggggtgtggccacaggcactccaccaactcctcctgcacccccaacccaagctgaacaaactcctccagactccctggcccaccccaacttaaagaaattaggagaattctccaagggggagaagacaccagctgcctctgcagtgctgtgcccaggaggaagatgatcactgttcaaactgccctggcaagttgtttcaaagaaataaagcccttggattctcagtgttctgaatcacattgcacttaataaacattagttttactaatgttttccacttacctgtctgtttatattcagcagtgagagttcttcatcttcaacaaaaagtgattaaaggacataggacatctgtcattttccccatggattattaagatcactctgcacatttcatcttgcacagtcatttttttctgacctgggctgcagtgctgagccacgtgtactgtgttgggttcattttccagattctttgctttttgtttgtctttgtcagtagcaccgagaatagtagatggcacatcccaggcactcagtaaaggtttttgaggggaaaggagggagaggaaggcactgcgtgttggggggtccaatgtgccagaatattccttgaaaacttgacccagagtctcccctccagggcctcgtgatgctcctcagcactggacgtggcaggatttttctgaccaagaatcaatgtgcaccttctccttccacagggaggtgctgggcaggctgatgggccctggtttgacttccatgccccaagacattcttctggcttgcaggaggagatgtggggtctcttggatgacagggactctgggcccgacaccgttctgcctcattccctcctgaaaagcctaatcctccctgttccacgaggctgtgatgagtgaggagacagaaatgcacaattttcagagagcatcccttcccctggccacacgccaagcctgcttccctctgacctgtcccttgtctttgcattcaggatggacactcaccacctactctccctccccaggactcctcactggcctgactctgtgctcctggggcacggtggggcagcccctggaacctcatgcagaccagggcacacaaacggccttgggaactcacagtgtcatatccaggccccagtccccccagggtctcagacacaagtctgcagccgttcagggacatggctctgtgagagccagagaacctggcccctgccctgctgccacttccctcctcctcccttattccagcctcagaagctcctctggccactcactccctgacttggctttgctctttcccttagttcctctggctctgtccagcctgcaacaagtcccaagaacgtcccctactcccagggtgctacgagcacctccctagcatcaactctctgctctgagggtgaccctctcctcagatccttattagaggaaaaaaggagcagcccctggtagggcaagaagtgatctgactcagacagaaaacagacttatcgcatcccaggtgcagcttgtcagctttcaggctgggccaggggagcttggaaagggaaggcccctgcccgggaacctctcccagggattcccatcagcctggaatccctaggagaaccagaggagtcaggtcttcctctgcaagccaggcaaggtcagtcaccctgcaacagtcccaggtgcctctttaggtccacagcagcagctgaggagctccctgctttgtgccttgctatgttcaccagaatacctcagtagaacttggggagaattccttcattactgctgatgacagggaaagggtcttcaagcatcatggccatgttccaagctccaggagagatgggctgatattcctgagatgcagagtgtgggctgccctgaccctttccaggcgcccctggcccagccttagagctgaaaaggctgcacctggagaggaaaacagaagctcagaaatattctagagaccctgagcaagggcctgggggaaactttgagatcccagtggggattccatgagtggagaaggggtcaggtggttccttgagatgaactgcgaaggctgctctgacctgggcagcagacaagcaccttgagaagaacaggcgacaggatatggtagaaaaggccccaagtgcaggattctcaccagggtcctgggggtggtgcaagactccctgaattgggtaggaaggaaaaggctgtcaatcagttctttgtaacatttaggttattgaaccccttgggggatcctctgagccctcacctgagggatctgccaatcatttgcggcctgaacatgggcagattcctctccctggccgagtctcagggtcaccaggttaaaaatgcgggaaagagcaacataccttaggttcactgggagggagaggtgaggtctctgtgagggagagctgggtgaaaagtactcagcccctgctgtgcctcgtggatgctcagtcaacagagatgctcacgaccatccttggtgctgagctcaccctcagcctcaggttcacaaagcaaggggctgggaagtagaagcctcactgagtacatttcagtttaacttgattgcacacataaggcattgatagtgaggtcagaaatgtggagagaaaacatttccagaaagattccgagatggagaacatccttcgaagaactccagctttggtgggccagtggcatctcagagctgtttgggtgtcataaaaaatgggagagaaaggcctggaggattctctggggtgggggaggctcttgctactttgtatcccaaaacatcagaagaatcacggtgtgattctgcccaggatgggagccacccctaagcttacaaagcttgcagcgtgatacggagctctgggttttgtggggaaatgtactaggatgtgtgcactgtgcttaaagagagaaaaactgagttctcttattttctttgtttctcttttttttttcctggggacaaggtctcactctgttgggtttccctctgttgagacaaggtctcaaggctggagtgcagcagcacgatcatggctcactgcagtactgacctcctgggctcagggaatcctcccatctctgcttatggggtcactgggaatacaggtgcacatgaccatgtctaggtagattttttttttttttacagagacagtgtttcaccatgttacccaggcaggtctcaaactcctggactccagtgaccaccgtgcctggcctgagttttcttcatatgcctaatgttgttgttctgatcagaatctctatgttcaatattagggacaagagaggactttaaggatgagaaaacattaatgatcaaaatatacctggaaaggggccgatgggattgatgaggatgaagggccctgggaaatgcctggacctgagggttgctgggaaatgttccactgtgggaagatccctgagtctaaaggaaagatttccagaccatagcgccatgacagggagacacggacccttgtgcatttctcccccatgtcctgcagagcccacagcttccaccctctgtggcttccagcttgggggagtctcccttcttaggcctggccactgtgcttctgtctggcctctgtcccagctcacattctcagattcaatctcccgaagctggttttctgaggggtgcccatcatttttgtgagtaaacacgctttaccttctagaggtgaccaagactgtatctcgtcccatgccctcaaaggcaatattgtgttttgagtctacagtgtctcttttgtaattatttccttttcagtttttgaattcaatctaaatggagtctttcaatccttccgtctcctctcccacaaaatacccaccatgttttatgctgtcttggttccttcccagggttccattagaacacccggtcccatcctgcccagcccccacctcactttgtaattttggtttaatttcctccggagaagcctgaaccttcgtcttgagatcaatcacaccctcagtggttcccctctgccacctgaatgggcatatgatctaccatgttagaaagcgtaaatcccagctgaccactggatatgcagagatatttattctgctttcttagggatgaaattactgtcttcttagagctgttttagctctgagacattttgataatgtttatgtggccaaagatcccccagcaaagataccttcaggttttgttttttctgtcaaatgccagaaacagattcaaccctttcctgcatcactatgaagctctcatgtcagtcaaactccatcagtgtttgtggaataaaggaatgaatgagttgtggactttcaccctattatttatatctttcactttcataaacgtatatctgatccaatcaattaatcagaagaaagtcgcaaactcaatcaggattaactgggtggaacttcagaatctaatcagacatcattttctgattggaagttggttgttgagatggggagggtgtggttagaaaggtccataaaagctcccgaaggtgcacaggagagaatccaaggcgctgacacctggagctactgctcggttctctgagaggttgcagcaccctgcaaactgagtccagatctggtaagtcaccacctccttagggtcatgcccatctgatctgcagccagccagccagtcagggatggtgacatgcagcccaaggtggcagagagaattttcttgtctgttttcagaagaacaaatttaggctttgatttttcctctaaatgtagttttgtcttcatcccccaaaattggatttgtgcttggtttttgtcatttcaaaattcttattgaagcagttttttttttaacaagagatattaaaaagttacaactggttgaatttttatttcgtgacatttgaaataattagtttttgtgcccttaaattatagttcatagacttggtggcatcgtgattttacatgttaggccttagtttttactaataccttaaagatattccataggccattctcaagagtggagtctttgttctgaacatgggacccatttttttcccctagattccatcccaaagtgggtcattgtgagtctgtgtaagagatcaacattggaaccttcatctgagagttagtgtttttatccctaactttcacaggctctagaacactgtcatgctgtttttacaatttcttgttacaatttttcaaaataaaaaataatggcgctgattccaaggagtccctttagtcttctgcaagcatgtcaattgtgggaactgagaatgtaggctgtgtggggccacaggacattctcgttcccattgttttagggtggtaagtgacaagaaatattttctcaaaaaggtggagcttagctttcaggatcctcagcaacgcttcccagtgttactgagatttagtgcagcaatggttgaaaatgaatgggccagtggttaccttgccctctcctcattgtttggaagacattctttatggtaccagcaagggcagaattacagatttgtgtccagaaagtgcagagtggaattggggtgaactaattacctttccacctctaccagagcaatgacattggcactaggagatgatgaagtgatgtgatttgccgtaagaatgatgtttttttctctagattcatcaggatgagcctccaggccccacctagactcctggagctggctgagcagagtctgctgagagaccgggccttggccatccccaccctggaggagctgcccagggagctctttcccccactgttcatggaggcctttaccaggagatgctgcgagaccctgacaactatggtgcaggcctggcccttcacctgccttcctctagggtccctgatgaagtcatgtaatctagagatctttcgagctgtgctggaggggcttgatgcactgcttgcccagaaggttcgccccaggtgaggtgacccagctaaccaggtggggagggctcaggcatccagggtagggttagctgggtcagaaggagtgggaggcccaagggtggcccagagacttctgatggggctggggaggaagctcagagaggccttggccattgtccagctcctctgggaaaggactgctcaccatgcagggtccactgaaggatcaggaacctgcctcctgccagtggcaattgaagacactagcagtggggaccaggcaggtttcaaggagaaagagggatggagaaaagacagagagtgggagaagcagcagggaggagagtcgctgatgtccgggatgtggataaaagctcaaatccttcctaaatttggagcctctcttctcttttacccacaggcggtggaaacttcaagtgttggacttgcggaatgtggatgagaacttctggggcatatggtctggagcttctgcactctccccagaggccctgagtaagagacgaacagcagggaactgtccaaggccgggtgggcagcagcccttgatggtgatcctagacctttgcttcaagaatgggatgctggatgaatgcctcacccacttcttagagtggggcaagcagagaaaaggcttactgcacgtgtgttgcaaggagctgcagatttttggaatagccatccacaggatcatagaggtcctgaacacggtggagctagactgtatccaggaggtggaagtgtgctgcccgtgggagctgtccattcttataaggttcgccccttacctgggccagatgaggaatctccgcaaacttgttctcttcaacatccatgtctctgcctgcattcccctagacaggaaggagcagtttgtcatccagttcacctctcagttcctcaagctggactacttccagaagctttacatgcactctgtctctttcctcgaaggccacctggaccagctgctcaggtgaggaagtatggtgagctttctctgcagaccgcagcaaagactttctttattactgtaaacaccagggggtatctactgtgagccagcttgtgaggaggtaacagcgaaggggacactagaatgtccatgcattgtcctgttggcagctctgtcctgaaataggtgtcacacatccatcccaataagccagcgggatctcctgggctagatgctatagagaggctgccatgctaggaaggtactgcagggtttagatctagtgagggtgcattcgtgaattcctcccgaggatgtgtgtctaagttaagacgatgggaaatggggagttgaagagggcactaaagaagagaatgtccatcacacccctccattttaaaatataaggtctgtcctcacctgcctagtgaacaggtaaaatcctgtgtctccctctgtcagtaaaatgttttgagctccaaaacatgatggaatagagggtgagggagcaggagtgaagaatggtgaaagtgatagatggtttgctgatgatacgggcatgtcagggtctcctgcagcctggccaccccagctgaggttgcaggatcttgcctgggtttgtcatttatgcctgtgtctccatcgggctcctgtggcccagagatgtggttttctacctgacacatgaggaaagggagcattagagttcatggacttgacccagtcacccgagtgatggtgaaggactgagcctcgattgggtctgccctgaatgagcagagtctccattcccacaccccaggtgctgattatcctcagataagcagaacagccttgggttgtgaaaagtgtcatctctcaccttgaggtcttccccaccactctcctctaactccttcttgttctctcccaggtgtctccaggcccccttggagacagtcgtaatgaccgaatgcctgctgtcagagtcggacctgaagcatctctcttggtgcccgagcatccgtcagctaaaagagctagacctgaggggcatcacactgacccatttcagtcctgagcccctctcagttctgctggagcaagctgaggccaccctgcagaccctggacttagaggactgtgggatcgtggattcccaactcagcgccatcctgcctgccctgagccgctgctcccagctcagcaccttcagcttctgtgggaacctcatctccatggccgccctggagaacctgctgcgccacaccgtcgggctgagcaagctaagcctggagctgtatcctgcccctctggagagttatgatgcccagggtgctctctgctggggaagattttctcaacttggggctgagctgatgaagacactgagggacttaaggcagcccaagattattgtgttcagcactgtcccctgccctcgctgtggcatcagggcctcctatgacctggagcccagtcactgtctgttgaatgcctgctgtcagggtggatttatttaaagctttcttctggtcatttggcaactgaatcctaggccatgagtgtatgtcaaagggagcacagacccatcgtttcatatgcctgctcaatgtgaacgggaaaggaaaggggatgcaggaagggagggactgggggaaaagttgagttggagtcaataggagctttagagacctgtgtcccagagaatcagaaatgggaatctgaattgctagaatgagaatcaggtaggagagacacatgagacagttacccctgcacggatggttgtaaagaaacagtcagaaataaagggaagctgagtggaaactgtctggtgtcctccatgattgcttcacctggcttaacaattttaacctaaggaatctcaagttactcatgggggacaaaaggcactaagttctctaaaattaatgaggttcagcccaaggaaataaaggcatcaaagtggaatgtgatcgttttgctcaattcctttttttttaatttctctctgggcatgtgtctatttagtgggttaatacacgtgagatgcacttacggggcctggaccattctaggtgggcagtgagggtcagtcactgaagttcagccccttcttcgcagggccctcacttttgtccagatgcttagaccctgtttactcctgatgggtggattcagaacgctcagttgctgaccattacctgtgctgggaaaggatttcactgcacaaggtgtggcctctgccctggaaggggagctccacactgtatgagcaggagcctcagggcatcaccaacccatgcttgttctcatggagggtagtgacccttgcaatattaaaatagttgtggccaataaagacatccaaattccctttttgggaaaatgcttaaattatgcaggcatatagtacattttaaacatttctagcccacatttaacaaacattttatccttttggggagctaggtcatattgatgagattttcccataacacttgccttctctccctctcaaggaagactagtgcagtgtgtttgggtatcacacgtcatcagagggtggataatgatcaagtgcctgtgggtgatgagtgaccttcgctgtgctgagggaccctacacaaaaggctcccgagtgtgggaccctgctgaggacacaggggctggtgctgttgggcaggaagctgaggaaagagcctcaattttcctgtagaatgagaaggattatgcccaccagcctgtgggaccctcttaggacacagtgagatggtacatggttatgacttggaatggggcctttcatacagtaaaagcttaatacatgcatcctgtctttcttttttcctcctaataaaagtctcagcattcttcatccttcaatctcacctcctattcctcataacagggaggcagtagggacccagggcatgcaatgggactcagcttctacacgccgccaccgcttaatcatgattcctgtaaacagcaggacctcaacaaccagcaaagaacggggtgggcagtgcaggactgaattcatctctagtgatcatgagataaaaatttccaaaccacgggactcatgtgccatctgctgtaatttagttagaccgtctggtgtaatttagtgatgaaagcaggagtatattaagtggtacttccaaaaatctgctattatgtaaatgtttatggagtgtcactattcatttgttggctattctaaataattggccatgttgccccaataccccttaaagtcagaggtaatccaaagactttccccaattggagaagatttaatagaacaaggacttacaattccttgtcccaatccatgtaacccttccatcctgccagatataaaacctaactgacaaggttaatgatttgtgcaagacttacatgcaataaagaaaattgtaatagtgagatatactgtggcttcacatgaaatatcttgttatgtaaggtgactacagactctaaatggtacccagtgagagatttctcctctgccttccttaggattcctgttgatgaggagagccaatacttgttggcctttacttgaaaaattcagcaacacgcctgggttgtaacgccacaggggttcactggagtcccatcatagttctcgcagggataacaccaggacctgttaaccttaccattccctagaaattccactctcattcaatatgcagtaggtgtgcagttatgttctcttaccaagggacactctaatagattccatttatcttttagagcagtaagcttacaagggccctaagacctccatgaaaacttttccattctctagagaaaaggtccttacttaggacataatccaagtgcagggaaagcttccatctcatctgaaataataaagacaatccacggtttccctagtcccgtaacaatgaggaggtgccctcttacatgtgagacattgtagctgttggttcccaaatttctctctgctggcatcattcttataatgaactcacagaaaaactttgtcccagtgcgcctgagtgggcaggtgtaggacttgacactgggtgcaatgttatacaatattttttgcctctttccatgtgatatcaaatttattttttagtcctgttgcatttacatgagtcaaagcatgaagttcttgtgcttctatgaatgcagatgatgctagcaagtcagcttgttcatttgctttagttaaaggccttggtaaattagtacgtgctcagatatgagtaatataaaatgggaaatttctttttcttacaatttgttgtaacaaattaaagggcttgtttaactgatcatccatactatatttgattagggctgtctcaacatactttgtagctgtgctacatatgcagaatctgattttcaatgactcgttctttcggcctggtgtgaaccacttttccattgctggaaccatcagtaaacaccatcagagcattttctaaaggtttatgtctggtaattttaggtaaaattcaagtagtcaattttaaaaactggaagatttttgtttttgggtaatgcttatcagtaattctcacaaaatcagcaagaccaatctgccatgcagcagaattgataaagccttgtctaaactcttccttgtttaaaggaacaatgattttatctgggtcacttccacacaattttattatttgtaatcttgcctgaccaattaatgtagccatttgatccaagtacaatgtaaaagtcttaatcgtactgtgaggaaggaaagatcactccacaagatctgtattttgaacaataatgcctgttgagaatgtgcagtagcaaaaatcaaaagttggagtggggcgaagtgatctattctatttacttgtgctgaccgaattttttcttcaattaattcaatttctttagttgcttctggagttaatgttcttttactattcaattctggatccccactcaagatagagaacaaatttgacatggcataagtaaggatgcctagagttggccaaatccaattaatatctcctagcaatttatgaaagtcgtttaatgtttttaatgtgtcttttcttatttctattttttgttgtttaaattttctttcctctacctgcattcccaagtaatggacaggagtagaggtttgaatcttatcagatgctattgtcagtcctgcgtttgcaacctctgtctgcagaaatgtgtaacagtcaattaatgtgtctctcgtttctgcagcacacaaaagatcatcaacataatgaaagacgtagtctgaaaacttgtctctaactggttgaagagcttcagctacaaaaatctgacaaatagttggactattaagcattccctgggcaacactttccactgaaacctggtggctggttctttattatttatggctggtatagtaaaagcaaatttttcaaaatcctgttttgctagaggaatggtaaaaaagcaatccttcagatcaattataattaaaggccaatctttggggatcatggccagagagggcaacccaggttggagagcccccataggttgaattacagcattgacggctcttaagtcggtcaacatgtgccatctgccggattttttctgagttacaaacacaggagaattcaaggcgaaaatgaaggctcaatatgtccctttgctaattgttcttttgcccgtaagtgtaaagcctccagcttttgttttggtagcagccactgatttacccatacaggtttttctgttttccaagttaatggaatgggttttggaggctctacagtggccactcctaaaaaggatatcctattctttttctttcttgatttccctcagcctcaattgggattttaatgccatctccatttttccctagtcctttgccagggagacatctcattttagtcatgattttttgactcgtggggctgtataaggaggctgggatagtaatctctgcatgtcattgttgtaacaagtctcggcccaaaaaattatttggaataaaagtaatcataggttgaactgtactttcttgattatcaggtcctagacaatgtaaaatcatggtgctttgatacacttttgaggcgctgcccacaccgacaagtcctgtaacaggcttttgtttaggccaattttttggccattgatttaaggcgataagggaaacatcagcatcggtatccaataatcctataaactgctttccctgaatagtgactgtacacacaggtctattctctgagacatgacgagcccattgagtggcttttctggcagagttggtacttccaaaccctcctgtcctttccgttttgttttcccaattttaatataaggcaaaagcaataattgagcaattctattacctggattggcactccagggaacagtggagctgatcactaactgaatttcccctttataatctgaatcaattaccccagtatgaatttggactcccttcaaatttagacttcatctccctaaaatgaggcctactgtccctcctggcagtgggccatatacccctgtaggaatcttttgcggggtctctccagggagtaaagaaaccttttgagtggaacataaatctactgctgtgctgcctgctgtggcgggggacagctgttgtattgttgtaattggctgattccctgaagtggtggtatttgctgtgggggttgctgtccctgaaaaccctgaagaacaaacggctgaatcgggaatgccccagtttgttgttgggactgaggctggcccctcacccctttttctgacaatagttgcccatttttatcatatttagaacgacattgattagcccaatgttttccttttccatgtcttggacacaggccaggtggctctttatttttactctgtttatttaagactgggcagttcttttttagatgaccgatttgaccacaattataacatttccccccaaatgctctaactatcctcctaaagtgactccggtcattgcttgagccattagcattgccttacgcatagctcctccaatcccatcacaagctttcacatattctgtaattacatcaactcctgctggaccttttccttttaatggctttatggctggttgaaattctggatttgacttttgaaaagccattatttctacaataactttttgggcattatcatctgaaacagatttttcagaggcatcttgcaaccttgccacgaagtctggatatggctctttacagccttgtctaattgaattagaagaagggcaagcagtgcctgggcaagcgatgcctgggcaagcggtgcgtggggcacccaggtgcctgggtcctgaattttttcccagtccctgaggcaaagagcctttagatgttcaataccctcattctgcattactgattgttggccaattgtgctccaatttggacctgttcctagcaattgatctgcatctatattaacagcgggataaatagcctgattttttcatgcctgttcttgtactccatcaatccaccaggttttaaattgtaggaactgagagggtgaaagggaagatttagccaacgtttcccaatcatagggaataagtctatttccatgagcaatggaatctaataaagttctcatataaggggagttgggtccatattgtttaactccttccttcatatcttttaacattttcatggtgaaagattcatatctagcctcagtttggacagacgctccagcttgcccccctttcccagctggtattggttgtaaaattacaaggaactgccatgcctcacgatctccctgttttctggctttatcaatgatttcatgcagtgtactaccttgtccactaggtggtgatgtaggattaaacaccactgggttgctggtgaggtgccgtgctatgtggcacgggacacacagcttgaggtctgtattgaacctccggagacagcccatactgaagctcagctggcggccagtattgataaactaccggtggttgggtcttattttctaccagctgatattgtggatactgtatctgaattggcattgctgggatagagactctatccttttctacttgatattctcttggggtttgcacttgtctaacctgcatttgaggttgtaatgttacaggcatctgaaccactggaggaggagttgatggccatggtggtttaggctctggtagccccaataattctggacctccttccaccagttttgatgattcaggatatactacctcctgtaactgattgtagtcaacattttgcgttgactgagccattacagactctgctacatttttacaatgtgaactttccattaatttccgggattttgtctctgcctcttcttcacaatctactacacatctttcaggggcatcagaaattgaaaggctgtctttttctatttgaaacggttctaaagttgctttaataatgggccaatcattccatactgtaagtgggatgattttaccttccctatttgcttgttttaattctttgccaattttcccccaatcttttagatctaaagttccctgttttggaaaccatgggcagaattgttctattgtttgaaataacataattagattttctgtagaagctctaactccccatcttcttagaagaattttaatgaagctgagataagaggcatatttaccttcagtttgtcccattgttaccctgagttccactgagcgcacaagcttaccgcatggctgaccatggaagtacttgggaatctctcgttgactgtcttcaatgctcacgtttttagtgtaccttcaccctagagaaaggcccatgttgggcgccatatgaagggggtcagccactccacacctgtgggtatttctcatcaggcaggacaagagactgagaaaagaaataagacacagagacaaagtatagagaaagaaaaatgggcccaggggactggtgctcagcatgcggaggacccacaccgccactggtctctgagttccctcagtatttattgattactattttcactaactcagtaagggaaaagtggcaggagagcagggtgatagtggggagaaaatcagcaagaaaacatgtgagcagaggaatctgtgtcacaaataagtttaagggatggtactatgcctggatgtgcacataggccagatttatgcttttctccacccaaacatctcagtggagtaaagagtaacaaagcagcattgctgccaacatgtctcgcctcccaccacaggcagtttttctcctatctcagaatagaacaaatgtataatcaggttttatactgaggcattcagttcccaggggcaggcaggagacagaagccttcctcttaactgcaagaggccttcctcctttactaatcctcctcagcacagacccttaatgggtgtcaagctgggtggaaggtcaggtctttcccattcaatgaggtcatatttcagactatcacatgaggagaaaccttggacaatacctggctttccagggcaggggtccctgaagtttttcacagtgtattgcacccctggttacttgagaatggagaatggtgatgacttttatcaagcatactgcctgtaaaccttttgctagcaaagcacatcctgcacagccctggaccccttaaaccttgattctatacaacacatgctgctgtgagctcaaagttggggctaaagttacagattaacagcatctcagggcaaagtcagggtacagatcaaaatgatgtttcttatgtcttccttttctacatagacacagtaaccgtctgatctctctttcttttccctgcatacactattcttcttctttagtctgctagatatgggaagggtgttaagaagggatctctcatcaatatgacctggcccccaaaaagcatgcttgatttttgaatgtggtaaagaaatatttaaaccatgttttatgtctatatgattattagtatttttatattgttttgttttgttttgtttttgagatggagtctcactctgtcatgaggctgaagtgtggtggcacaatctcagctcacagcaacctacacctcctgagttcaagcaattctcctgcctcagctgggagtacaggcatgtgccaacatgtccagctaatttttgtagttttagtagagacagggtttcaccatgttggctaggatggtctcgatctcttgatcttgtgattctcctgcctcagcctctcaaagtgctactattatatgtataagccaacacgcctggccatatttatatattataggtagtattttgctaaaagggaattttgatatctttataagacacaactagtttaattaaggaaggagcactgcccaccatgatgacaggtatgggttggtgatgccctgaagctccaggtaatcaatgatgtgaatgtccccttccaaagcaggggccatgccttgtgcagtgaatctctgtcccagcacagctaatggtcagaaatggattcttctcaatctgcccgttaggactgaacagggtctcagcatctggttagcagggagggaccctgagaaggggctttacttgagtgactcacactctttgcccacatagaatgttcccggccctgtgtgtgcatcttgtgggtattcacccactgatcagccacagaacaaagcaagtaggtaatagatttataaagagaagtaaagaacagaagggaattgataaaaatgaggaaatttcatttggatgcctgacttcctggggcaggacctcattaaaaacacagctcggtgcttctgattttctctttttcttgtctctttttcctgagacggagtcttgctctatttcccaggctgcagtgtagtggctctatctcagctcactgaaacctctgcctcctggcttcaagcgattctcctacctcagcctcccaaatagctcggactacaagtgcctgccaccatgctcagctaattttttttttggccccgagtctcgccctgtcgtccaggttggagtgaagtggcacgatctggagatctcaagtacatggaccggggaggctgcaggaatttgtttatcttgggctgggggtgcatgggaagtaggtagggctcctgtgaccacaaacccaaggcctctgggatcagaaggcaacaacaagggccaggacctaccccggggcctgtgcttgcagggaccctggctctcatttgtatgtggggtgcctgagtgatttcagattcctcacccatccccgttggctcttctaggggagatgcatctataacacctgtaggtgaccctgtgtaggaaaagattgcagaacccacacgggcccatgctgagtgaggctttctccaggtgggcacaaaaacccctagctccccagccactgccagagcttggggttgggggccctacatggaggcaaatgcagggagcattggcaaaggcagggctgagtgaaaggagaagaagagcacatggaaaagacacaggggtctctgacagttccagggccagaggcacttgggagtgggagaggcatgactgggagataggtccagggctttttctgagccctgaggccccagcaggtttacttccctccgaagatctctctgggctattgtgcctgggagtcaaggctggctccgctgcagccctgtgggaagggcatagatccctcagggtctaaggttcaactttactcttatcctcaaatgagggcttttacccagggatctcttgtccgcagatcccacgtcttcttgctggactcccagaggaagttgtcctaccagggacatgggatgttttacttttctcttccatggaaccatctctgtcaggtagagttgtgcctttctaggtggccgcacacacacacacacacacacacacatacttaccatgtggccattgcagtgatgcccactgggcttcgggttcttccatagcacccagctgaaaaaagcctcacctaaggctaagaagagacatggcttggacaaaaaaatacttactgcattccaggtgcatctttatcagctctaaggctggaccaggggaacctgggaagggatggcccctgtgctgggacctgtcgaaggctctgtcatcatcctggcagccttggaagactagaggggtcaggtcttcctctgcaagccaggcagtgtcaccacccagaagtccagggtgcctctttaggtccagagcagcagctgtggagtttcctgctttgtgccttgccatgttcaccaacatcactcaatataaattggggaaaatttcttaattactgctgggtctctctgcattgtggccatgttctgaagtccaggagagatgggctgatggccttgggatgcataaagtgacgccggccccatcagctcaggctgggggagaaaacagaggctcaggaatattctagagagcctaagcaagggcctcataggagctttggaatcccagtgtggattctgggattggagaataggtcaggtcgttacctgagatgggttttgaagcttgctctgagcttggcagcagatgagcacctcgagaagacctggcgacagaacatggtagaaaagaccccaagtgcaggattctcactggggtcctgggggtgctactgcaccccttgaaatgggcaggaagagggagtcagtcagccagttctttccaatatttagcttattgaacaccttaggcgttccactgagcccctcacctgaggggtttgccaatcatttgctaccagaacatgggcaggtttttctctggccaaatctcaggtttatcaggttagaaatggggaaaatagcaacgtgccttagattctccatgaagaagagctgaggtccgagatgatcggtaccagccatctgttgtgcctcgtggatgctcagtgaacacagattctaacaaccattattggtgctgagctcaccctcagcctcaggtttacaaagtggggcatgggaagtagaagcctcactgggctcaggtgatcctcccacctcaacttcttgggcagcttggcctacaggtgcacactgcctccccccagctaatatcttgtatttgtattagagacagggtttcatcacattgcccatattcctcacaaactcctgagctctagcactctgcctttcttggcttcccaaagggctgggattagaggcctgaggtctttctttcttttccttccttccttccttccttccttccttccttccttccttccttccttccttccttccttccctctttctttctttctttctttctttctttctttctttctttctttctttctttcttgcttgcttgcttgcttgcttgcttgcttgcttgctttttcttttgttcctttttgacagtgtcatgccgtcacccaggatggaaggcagtggcgccatctcagctcactgcaacttcgcatcctgggtttaagcgattctcctgcctcagccttctgagtagctgggagtgcagacatctgccactatgctcggctaattttttgtatttttagtagagacggagtttcaccgtgttagctagaatggtcttgatatactgacctcatgatcagcccaccttggcctctcaaagtgctgatgttacaggcatgagccactgtgcctgggtctgagctttctttgtaggcctaatgttgatgctctgataagaatctctatgttcaatattagtgacaggaaaggactctaagaaggaggaaacatgaattatcaaattagagtaggaagggagtgggtgagattaagatttggatgaagggtcctggaaaatgactggggccaatggttgctgggaaatgttccactgtgggaagatcccagagtctaaaggaaaggtttccagatgatagaacaatgacggacatatggaccctcgttcatttctctctcacatcctgtagagcccacagtttctacctgggtggcttccagcttgggacagccacccttcccaggtgtagccacaatcttctctctggcctctgctccagctcacattctcagattccatctttgcaagctggttttctgagaggagcccatcatttttgtgggtaaacaccctttaccttctagtagggccaagactatacctgccccctgtgttttcaaagtgaatgttatggtttaagtctgccctatctcttttgatgattctccttttaatttctgaactcaatctagggtgggtgagatggctgatgcatgttatcccagcattttgggaggctgaggtgaggagatcacttgaggtcaggagtttgagaccagccgggccaacatggtgaaaccccatctcgactaaaatacaaaaattagtagggcttgttggagtgcacccgtaattcccagctacttgggaggcagaagtgagagaattgcttgaacccagaaggttgaggctgcagtgagctgaaatcgtgccactgtactccagcctgagtgacagatgtaggcccagtctgaaaatcaaacaatcaataaataaactcaatcttgacaaaggactttgagtcctgacatctagatgcccacaagataaccgccatgttttacattgtcttgtttcctttgcaggttcccattagaacacctagtctcattccgctcagtccccacctcacttggtcactttgtcctgatttccttcagtgaagccttgacttagtcttgagatagatcacaccctcagtggttcctttcttctacctgaatgtgcatatgatctgctatgttagatagcataaaacacaggtgaccattcgatatacacagctttttattctgttttcttgggaatgacatcactatcttcttcaggctgttgtagctctgaaacattttgacaattttgatgtggccaaacatcctccaataaggacaccttaaggtttttttttttttggtctaatatcaggaacagattaatcccttccctgtatcactatgaaagtcgtgtattagcgaaacttcatcagtatttgaggaataaatgaatgaatgagttttggactttcaccctattatttattcttttacttccataaatgtgtatctaattcgatcaattagtcagaagaaagctgaaaactcaatcaggattaactgggtgtgactgcaagatctaatcaggtatcactttctgattggaagctggtgattgagaagggaagggtggggttagaaaggtctataaaagctcctgagggtacccagaagagacccacagcactcattcctgaagctactggttggttccctgagaggtcccagaactctgcgaagtgagtccagcgctggtaagtcaccacctgcttagggtcatgcccatctgatcagcagccagccagtcagggacggtgacacacatcccaaagtggcacacaatatttttctgtctgtttcgtgagatgaacagatttaggctttcatttttcctctaaatgtagttttgtcttcatccatcaaattgtgatttgtgcttggtttttgtcattttaaaattcttatcgaagcaggttttttaaaaatatattaaaaatttacagtgacatgaatttttatttcttgacatttgaagttatttgtttttgtgcccttcaattacagttcatagacttggtgttattgtgattctccaagtatgctttcattttcataaaatccttaaaggtatcccacacagcaatctcaagagtgcagttttgctcagatcatgggattcatctttgcccctaggatctgtccaaaagtgggtaattgtgagtatgtggaagtgatgtctataggaaccttcatcttagagttacagtgctctagaatagcatggtagcacttttacggtttctggttaattttttttttcagatggagtttccctattgttgcccaggctgcagtgccatggtgtgatttggctcactgaaatttctgcctcctagttacatgcgattctcctgcttcagcctcctgagtagcttggattacaggcactcaccaccatgcccagctaatttttgtatttttagtagacacagggttttgccatgttggccatgctgtcctcaaactcctgacctcaggagatctgcccacctcagactcccaaagtgctgggattacatgagtgagccaccgcgcccagctacagttagcatttctatacataccttccaaatgctgtggaataccatcacaccacttttacagttccagtgaattttgtttttttctgtgatgtactctgagtgtgtcacccagactggagtgcagggccctgagctgggctccctggaaactctgcctctgggcttcaagtgattctcctttctctgcctccagagtagctaggattacagtcatgcatgaccacacctggctaacattttaattaacttatttatcaatttgtttttgtttgagtcagagtccaagtctgtcacccaggctggagagcagtggtgcgatcttggctcattgcaacttctgccttctggagtcaaatgattcttaatttttttatatttagtagagacatggtttcattacgtaggccaggctgttctcaaattacggacctcaagtgatctgcctccttggtgtccagcagtgttgggattacagacatgagccacagcacctggtccatttctggtagaaaattttcaaaataaaaaataatggcatcgattttagggagtccctttagtgttcccccagcatgtttatggtgtaaactgagaatggaggctgtctggggccacaggacactctcattctcattgctttagggtggtaagtgacaagaaatttttcttcaaagaggtagagcttggctttcaggatcctcagtggcactgtccggtggttctgggattcagtggagcaatggaagaaaattaataagtcagtggtctccatgacccctccctccttggtgtttggaagacattcttcctggtaccagtagaagcagatgattgtctttgccctgagagtgacacattttccctggatttgtcttctagagattttccttgcagatctatcaggatgagcatccaggccccacccagactactggagctggcagggcagagcctgctgagagaccaggccttgtccatctctgccatggaggagctgcccagggtgctctatctcccactcttcatggaggccttcagcaggagacacttccagactctgacggtgatggttcaggcctggcccttcacctgcctccctctgggatcactgatgaagacgcttcatttggagaccttaaaagcattgctggaagggcttcatatgctgcttacacagaaggatcgccccaggtgaggtgacccaggagggctggtagatagggctcaggtgtccagggaaagaacagcagggtcaggcagagaagtagcccaagtgtggcccagagtcttctgatggtgttggcgaggaagatcagggaggctttggccattttccagatcctcagagaaaggactgctcaccatacagggtccactgtgggaacagaaacctgcctttactcagtggaaggtaaagggaatagaagtggggaatcaaaagtcagaatcaaaagggaacagggattgagaaaagacaaagagaacagggagcactgaggacaggagcagctgatttatgggatgacaatgaaagcaaaggtcagggatgagtccttctaaattctgagtctctcccttactttacccacaggaggtggaaacttcaagtgctggatttgcgggatgttgacgagaatttctgggccagatggcctggagcctgggccctgtcctgcttcccagagaccacgagtaagaggcagacagcagaggactgtccaaggatgggagagcaccagcccttaaaggtgttcatagacatctgcctcaaggaaataccccaggatgaatgcctgagatacctcttccagtgggtttaccaaaggagaggtttagtacacctgtgctgtagtaagctggtcaattatctaacgccgattaaatatctcagaaagtcattgaaaataatatacctgaatagtattcaagagctggaaattcgcaacatgtcctggccacgtctgataagaaagcttcgttgttacctgaaggagatgaagaatcttcgcaaactcgttttctccaggtgccatcattacacgtcagataatgaactccaaggacggttagttgccaaattcagctctgtgttcctcaggctggaacaccttcagttgcttaaaataaaattgatcaccttcttcagtgggcacctggaacagctgatcaggtgagaaaggatcatgcactttgtatgcagaccacagcatagccttgttctgtaacagcaaacattagaaggcatgtactgtgtgccagccagtggcaacgtcacagtgaaggggacatcagaatgtcaacacattgtcccattcagtgttccatgtcctggagtggctatcacaggatcgctccaataaggggagaggggtcacctggggtagaagctagagagggacatcatgtacaagctagttagtgggggtttcagctctattgggggtgcacgtgtgaatttcctgttacaaagtgtgtttcaagttgatatgatgtcaaagagataatagaggagggtatgaaaggagggaaagcgcatcaaacctgtccatttcacaatagaacgtctgtcctcaccggcttagtgatcacgaatgatcctgtctctgattccctgtttgtaaaaggttgttttgaactccaggaaaggtaattgacatgggaaatgcgtgcttccgggatggaggtgagggagtaggcgtgagagtggtaaaaagtgacagttggtttgcagatgcaggcatgtcagggagcccctgctgacatgtagctctagctgatgtccctagaccttgctcagttgagttctttgttcacatctcccaccgggtacctgtggcccagagatgaagttttctgctaaaagatgaaaaaaaaaaggctttagagattttatggccttgaaccaatcacacaagcaatggtgaaagggctgaggctaaaatgggacagcccctgaacgatcagggtcctcatcatgcagcaacttccatgaggaccatcatcagatggtgggaacaaacttgtgtttgtttgacgcaggcattttcctagatgaaggcactaccttcatctaactggtatcactgcccagaactaacttcttgatctccacaggtgcctccagaaccccttggagaacttggaattaacttatggctacctattggaagaagacatgaagtgtctctcccagtacccaagcctcggttacctaaagcatctgaatctcagctacgtgctgctgttccgcatcagtcttgaacccctcggagctctgctggagaaaattgctgcctctctcaaaaccctcatcttggagggctgtcagatccactactcccaactcagtgccatcctgcctgccctgagccggtgctcccagctcaccaccttctactttggcagaaattgcatgtctattgacgccctgaaggacctgctgcgccacaccagtgggctgagcaagttaagcctggagacgtatcctgcccctgaggagagtttgaattccttggttcgtgtcaattgggagatcttcaccccacttcgggctgagctgatgtgtacactgagggaagtcaggcagcccaagaggatcttcattggccccaccccctgcccttcctgtggctcatcaccgtctgaggaactggagctccatctttgctgctagggaaggcgtgcccagtggggtagagaaatccaaagttctcttccaggcacttggacactaaaatctactatgtgggtgcaaactatttttctcttttcttatttatttcattttttaataattccaaaatttttattaaagacaatttgagacagggtttcgctgtgttgctccagctggtctcaaactgctgggcttatgggatcctcctgcctcagcttcctaaagtgctgggattactggcatgagtgactgtgtccaggccacatgcaacttaaaggaagcacaggcaagtgttcagtgtgagggaaaaaacataacagcagggggcaaggttggaggaaaatgttgaggtgacatcagtgagaacttcagggacccgtgtcctagagtcggaaagagaagctaaagttctacagtgatgagactgttatccctgcaaggatggttaccaaggaatatcagcaataaagagcacctgaatgaaaacttttaacctgttgtgcaatttatccatcagaaatctctagttatcgagttacggatggaaaaataacgaaatactaatttgtctgtgattgagtttcagttgtagaacatcaaagcaaccaaataaaaattagatcattttgagtatttcccacccattcttgttctttgttttgttttggagacaaaatctcagtttgtcatttaggctggagtgcgatggtgcaatctgggctcactgcaatcctgtccttcagggctcaagtgattctcgtgcctcaaccactcaaatggctgggactgcaggcatattccaccaagcctgggtgatttttgtatttttaataaagatgggatttttccatgttgatcagcctggtctcaagatcctgtcttcgagtgatccaccaaccttggcctcccaaagtgctgggaaaacaggtgtgcagatgatctccacccattctttacttctcttcagtcatcagtttttttcttcctttttttgcctgcagggagcagctcggtcaggcacaaagggacaggcagagaggggccccaaggagaagataggaatggggtggtgccccgctcgcacaagaagtgtggatgccaggcccagaaaacagagctggggccatccatcagggggccagggtgagaagcacaagtggcacctgcttcaaggtcctgttgagctatctggccactgtgcccatcctgttaacagtgtcaagctcctgggtcttgaagggaggttccatgcggatccaccccaggctgtttttccaagatctgccccctgtaggggagaccatggagtctgattgctgggcctgggaaccacgaaccactcctggaggccccccccttggcagggtcatgagccaggcctgtgctccatgtccctgaggcagccagctgtgccacccacaccctctcatggcaaaatggaacctggacccaggtctggagtctccaccacagcctctacctcactgcccactgcctgctgttagcctgcaagctcctggatgatagtgcagttggggctggttaaaccacacccaggagcattgggtttgtttgtgcggggttggtcagagctgctgtgaacctgcatctcacctgtcctctctgtggggaaacacagagagagggcacagccaaggctgcgtacacttcggagctgatgggagcctgggacaagagggagtcctggtcctctcgagttggcagggcagcagctccaaaggtgcaactgaatctgcccaggtcacagttaccaactgaggtcccccagtgctcttgagggcccaggagatccccacttctccttcagcttcagggtgtctgttcccactgcctggtctctcatggcgcctgccctaattttggggtgtggttgtggtcgagcctggatgctgtcacagcccaggtgggtctgtgaacattttggtcagtgcatatacagcatcccatggctgccttgaaccctctggactttgggccctgatgagtatagaaggggggctgaggggggattgcggacagatcagcgctggtctttggatgctccttggtacaagtgacttgggcaacatggttggtggtgggagggaggcagaatcttggacaggaaggtgagggtcactggtgaggctccaccttctgaccaaggagggcctgaagcccgtaggctaggccaccagtcctacggaccagaatgggaacatatgttgccttttctgtgcctgctcatggccacctatgacccaatgagcacatacttttctccagtctgatgctggaaaaaccccagactcagggagaacatcaggaagaccagtggcagagaggaactacccactactgggatgattttcctgcagagacaagcaacccactctgggtctttttctctgctgagagctgtagagatgatgagatgactttcctgcagagagcagcaacccactccagggcctcctctctactgagagcagtggtgatgatggaataacctgccaggagagaggggtcacccactccagcgcctcctgtctgctcagagctgaacactcatcaggacaccctagctgcagaaagaagttacccactgtgggtctctgagctgttctattgctcagtaaagctcctctttatctcactcaccctccacttgtctgcataattcattcttcctggtcacagaacaagaacttgggacccgcctaatggtgggactaaaagagcaataacacaaacaaagctgaaacacagcccttgctcaccaagttgtaggtgaagagaaaaagagaagagctactaatcttccaggagcccagacatgggagcttcctgagccagggctgttactcctttctgggggttctgcagttactggcatttccaagctttcagtattggtgtcactgtgtattccagtgacaaccatggaagctgcttgtgctgtgcctggttcatttgcagccttgacgaaatctggcacccgtgctggcacctggagctgcctgccccactgctgcagcagcagccagtgactgtccaaagtggccagaccccctgctcactcacacacccctcactgctctacccctgacctgcccttaataggcatgtgctccaggcctaaaacatgagtcaagcatagtctactaggctgcatgggcagaacgaacccagtgatccccatcaaaactctggcaaaggtgcccccagccacagaggtttctggccagaaaagtcacattccaaggattccagaagagaaaattacttaaacacaaagaaagacaataagaaaaggatggaagagagaagtctctaaacaaccaaaaaaacaagaaatgaaatgggagtactaagcctttatcaataaaaacaatgaatataatttatctcacttctgcaagtgaaaggcatagggtctttgaatgagtaaaaaaataagaccctactatatgctgttttccagaaactcacttcacctataaggatacatgtagatggaaagtgaaggggtagaataaagtattccatgcaactggaaaccaaaaaacagcacgagcatctgtacttatgtcaggtaaaatagatgccaaatctcagaacgcactcaggtaaaacagaatacaaatctaagcttgtaaaataatggactacacttacacaaactatgcctagaaagaacatacatcaaaataatagaagccaaaaatgacaaatccatatgcaacatcatattgaatgaagaaatgttgaaagtattcccactaagaaccagaagaagacaaaaatgctcactttatccacttgtaatcaacataggactgaaagtttttgtcagagcaatctggtaagcaaaagaaataaaggacatttaaattggaaagaaggaagtgaaactacctgtgtttgccaatgatatgatcgtatgtgcttagaaaacctgaaagattccaccaaaagactcgtagatgagataaatgaattcacttaagtctcaggtccaaaatctgtatgtacaaatcagtaacacccttttataccaacaacaagcaagctgagaatcaaatgaagaactccatccctttacaatagttgcaaaacaacaacaaaaactgacaataacaaaaacaacctaggaatacacttaaccattaggtacaggatctctacaaggagaactacaagacactgctgaaaaaaatcatagatgacaaaaaaggagaaaaacgtcccatgctgatggattgacagacacaatatcgtgaaaatgaccacactgcccaaagcaatctaaaaattgcgaacatcaaacatcaatctaaaaattgcatacaccaaaatacaaacatcatttccacaggattacaaaaagaatcctaaaattcatttggagccaaaaaagaggctaaagagccaaagcaatcctaagcaaaatgaacaaatgtggaggcatcacattacctgacttcaatttatatggtaaggcaatagtaagcaaaactgcatggtgccagtatgaaggtcaagacatagaccaatggaacagaatagagaacccagaataaagccatatacttacaacccagtggtaggactgctgtttatcagtttgtgctgagtgatgtcctttggagaaatggggccaaagttactggatttttcccccaagaaaaaccagagtgaattgtaatatccggtgtgatttttagactctgactattgccatagtgattaggtcatctccaggtacccagagactcaatcaccaaccagtgtccacattcttgtcatcgctgcaagaaagagtttaggaagtaggcagaatgaagcaaaaggcaagaagtgtctattgcaaagcaaaggtagatactcaagagagggccaattcaggagagtgagttgtgtacaagggagtttgggtttctaattttataggatctctaaggagaggttgaaataatcgttaggattttaagaaaaaatggtgaagttttcttagaactgaagtgtcacctattatttatttatgtatttatttatttatttatttatgttttgagatggagtttcgctcttgttgcccaggctggagtgcaatgatcttggcttactgcaacctctgcctcctgggttcaaccaattctcctgcctcagcctctggagtagctgggattacagacatctgccaccacactcggctaattttgtatttttagtagagacgagatttctccatgttggtcaggatggtctcaaactcccgacctcaggtgatccacccaccttgggctcccaaagtgttgggattacaggtatgagccactgggcctggctaggtttcacctgtttttgtactaaatatgggcattctcagaaccgtcctggcgctggtgtgtgatttactgtcataatgggtgtataattaggcctggggtagggcaagggtcaaacccagtgccatgtctgaccaattcagtgtcagccagcttagccccgtcctgcttgtttgggtcttattggtcaaggcttatccttattcttgtagctaattttacaagctcttctcttgctgctgtatgaaatcactgcttgatattttcatgcttctcctgtgaccagccagctttcctattttatgggtatttcttttcttttcccttcccttcccttccctttgcttcccctcccctcccctcccctgtcctgtctgtctgtctgtctttcttttctttctttctttctttctttctttctttctttctttctttctttctttctttctttctttctttctttctttctttctttctttctttcccttccttccttccttccttccttccttccttccttccttccttccttcctttctttctttctctctctctctctctctctctctctttctttctttctttctgtctttcttctttccactttaagttctgggatacatgtgcagaatgtgcagttttgttacatacgtatacacatgccatggtggtttgctgcacccatcaacccgtcatctacattaggtatttctcctaatgctacccctctcctagtgctccacaccctgagaggccctgatgtgtgatgttcccctatctgtgtccatgagttctcattgttcaactcccacttatgagtgagaacatgaggtgttttggtttactgttcccgtgttagtttgctgagaatgatggtttctagcttcatccatgtccctgcaaaggaaatgaacttattttttatggttgcatagtattccatgatgtatatgtgccacatttgctttatccagtctatcattgatgggcatttgggttggttccaagtctttgctgttgtgaatagtgctgcagtaaacatacttgtgcatgtgtctttatagtagaaggatttataatcctttggatatatacccagtaaagggattgctggatcaaatggtatttctggttctagatccttgaggaattgccacactgtcttccacaatggttgaactaatttacactcccaccaacagtgtcaaagcattcctatttctccacatcctttccagcatctgttgtttcctgactttttaatgatcaccattctaactggcctgagatggtatctcactgttgttttgatttgcattagagaagtgcaaatcaaatgaccagttatgatgagcattttttcatatgtctgttggccggataaacgttttatttttgagaattgcctgttagtatccttcacccactttttggcggggttgtttgtttttttcttgtaaatttgtttaagttccttgtaggttctggatattagtcatttctctgatggatatattgcaaaatttttctcccattctataggttgcctgttgactctgatgacagtttcttttgctgtgcaaaagctctttattttaattagatcccatttgtcaattttggcttttgttgccattgcttttggtgttttagccatgaagtctttgctcatgcctatgtcctgaatggtattgcctacgttttcttctatggtttttatggttttaggtcttacatttaaatctttaatccatcttgagttaatttttgtataaggtgaaaggaaggggttcagtttcagttttctgcatatggctagccagttttcccaacaccatttattaaatagggaatcctttccccattggttgtttttgtcaggtttgtcaaggatcagatggttgtagatgtgtggcattatttctgaggcctctgttctgttccattggtctacatatctgttttgataactgtaccatgttgttttggttactgtagccttgtcgtatagtttgaagtcaggtagcatgatgcctccagctttgttctttttgcttaggattgtgttgtgtatacaggttcttttttgcttccatatgaagttttaagtagtttttctaattctgtgaagaaactcaatgataccttgatggggatagcattgaatctataaattactttgggcattatggccattttcacaatattgattcttcctacccatgagcatggaatgtttttccatttgtttgtatcctcttttatttcattgagcagtggtttgtagttcttcttcacatcccttgtaagttgtattcctatgtattttattttattttagcaattgtgaatgggagttcactcatgattggttctctgtttgtctattgttgatgtataggaatgctcgtgatttttgcacattgattttgtatcctgagactttgttgaagttgcttatcagctttaggagattttgggctgagacgatggggttttctaaatatacaatcatgtcatctgcaaacagagacaatttgacttcctctcttcctatttgaatactctatttctttctcttgcctgattgccctggccagaacttccaatactatgttgaataggagtggtgagagagggcatccatgcagtgtgccggttttccaagggaatgcttgtagcttttgcccattcagtatgatattggctgtggctttgtcataaatggctcttattatttttacatacattccatcaacacctagtttatctagagtttttagcctgaaagggtgttgaattttatcaaaggccttttctgcacatattgaaataatcatgtggtttttgtcattggttctgtttatgtgatggattacgtttattgatttgcataagtggaaccagccttgcatgccagggatgaagccaacttgatcttggtggataagctttttgatgtgctgctggattcggtttgccagtattttattgaggatttttgcatcgatgttcatcaggaatattggcctgaaatttccttttttttgttgtgtctctgccaggttttggtatcaggatgatgctggcctcataaaaatgagttagggaggagaccctctttttctattgtttggaatagtttcagaggaatggtagaatttgactgtgaattcttctggtcctggactttgttttgttggtaggctattaattattgcctcaatttcagaatttgttattggtctctttaggcatttggcttcttcctggtttagtcttgggagcatctatgtgtccaggaatttacacatttcttctagattttctaacttatttgcatagaggtgtttatagattctcagatggtagtttgtatttctctgggatcagtggtgatatcccctttaccattttttattgtgtctgtttgattcttctctcttttcttcttaatttatctggctagtggtctattttgttgatcttttcctaaaaaccagctcctggattcattgattttttgaagggtttttcatgtctctatctctttcagttgtgctctgatcttagttatttcttgtcttctgatagcttctgaatttgtttgctcttgcttctctagttcttttaattgcaatgtcaattttaggtctttcctcctttctcctatgggcatttagtgctataaatttccctctaaacacagctttagctgtgtcccagagattctggtacattgtgtctttgttctcattgttttcaaagaacttatttatttctgccttaaatttgttatttgcccagttgtcattcagaatcagcttgttcagttttcatgtagttgtgcagttttgagtaagtttcttaatcctgagtactaatttgattgcactttggtctgagatactgtttgttatgatttccattctttcacatttgctgaggagtgttttacttccaattatgtggtcaattttagaataagtgtgatatggtgctgagaaaaatgtatattctgttgatttggggtggagagttttgtagatgtctgttaggtctgtttggtccagagctgcgttcaagtcctgaatatcgttgttaattttctgtctcattgatctgtctaatattgacaggggtgtttctttaattagaaggtagaatagtcattagatattccaggaaagcagaggatttcagagacttgaaattaccacccctttcttccttctttgggtttctttggaagaatcttggacaagtcactctgaccgggacttttgccattttctggctcttatattgagttttgttttaccttgtgttcctttgctgagttcttattttatctttgcagttttccgtcttcctgagaccaatcactggtattcctatgtgatgcccataaggtttttttcgtctattttataaaaattttattaataaaaattgtatctgttcatggggtacagtatgatgttttgatatattcatactctacaatgtggaatagtgaaatcaagctatttggcattcctaccacttcacattcttactctttttatggggagacatttaaaatttactgtctcagtattttcaattatataatatattattactaactatagtcaccttactatgctatagatattcaactcactcctcctttctaactgaaactctattttttaaaacattatgccaacacatatctggacacatttggcttttgggatcctaccctctcctctgagataggagaacagtgcagtgtgccctgtggccagacccagaatgatcctgatggaattagaaaagaaactgcacctctttcctcttccagatctgatgttgaccttagttgaaggtctgggatttgaaaactgctgggattggaatcctggctctcaccttactcccacctacaccagtaggatatatagtccatgggaagcatctgggaacatctatcgtgtgagtcctaagaatgaataaattgtatacacctttacaattttattgaacagggttatttcatgagtgttatattgttcttgggtttttttctcttaataacataaatgccttgaatttaaaatgtcctacaaagaccttgagtcgttgtcttcatgctggcttttcacttactcttcccaacttcgctgagtcaagaccaaactctaggaggtgctgtcaacccatcgcttttcctcaggcctcacacccactcctgaaaccataagagcaagtcacattgactctacctccaggatgtccccaggctgtctgcagccacaccaggtgatgccaagacctcctgcctgggcattgcagtggccaccttattgttgcccctgcctcctggttacctctctcagggatcaaagtcctccgggccataatggggaactggaaaacaggcctcaggtggcctcaccaccccagtccaaaactgccaatgactcctgtgccacccctgcctctgactgcacctctccagcctcatctgcctgtgccacttcacgacatgccactttcaaccctggtcttctcattctgtctgttccccctaagtccatgagttagaggctgtgttcatttatgtgcgttctgagttggtttccactttaggaaaaatgctgggcgaatggggcagggggtggctgatgtctctaggtctcaggtgagtagaagggaggcttttatcaactgggttctgtgagagaaccccaggcccagagggcatctctgcaatgacttcatggtatgtacatatatgtgtatgtggtgtgagcacttagaaagtcacaaccctccaggatggagctggcctcatatagattaagatgttttgcacttggcagataaatgtaaaatacctcatgtccctggctgggcaaatcccccaggagtccagcaagaagacatgggatctgtggacaggaggccactgtgtgaaacctctcatttgagtatcattttaaaagttgcacttgagaccctgagtgccctatgtccttcccactcaccaaagaaccccagctgagccagccctgactccagacacaagagcccagggaggagctgggagagaaggacacccgctgtgacctcagggcatggaaggagctctgacctttctgttgatgatgccttccccactcccaagtgcttctggccctgaagcttccagtgacccctgcgttccatccatgccctcctctcttacctccaaccctgcttcttctaaagtcccatgcatttgtctgcatgtgagtgccccagtctcaggctctggcagtggctaagaggctcggggttcctgtgcctgtctggaggcaacctcactctatgtggacccacgtgggttcttggatttctttcttcaccgggtcccctgcaagtatacagtagatgcatcaactctagaagagcaaatggtgatgagtgaagacccagaaccgtctcaggcatgcacatggaaagagagagagcggtccctggaagcacaggcctgggggtggttcctgggcacttctgtctcctctaataaaagaggtcagtgactttggccacagaatacacatccacttctcatgggttcatatccaaagaacaaactccttcagactcgctggtccatgcactcgagatccccagggtatcttgagttattatgtcaaaaggagagagaaaccagctaacactagtcctaatacttatacgaataccaagagggatgttttcttcttgctgttccagggaatgtgctgagttaacaccttttttctttttattggagccgctgtggcagggaagacagtggtgaggggcttcctttgagtaaaaagcaggtaaattcagcccctgcttgctccactgtctgcccctccagggcctctgtgtcctgatgcagagtccagcctgttctcaccaggctcgcatcccttatgccaagagacccaccaaaaaagaaagtcccaagaaacaggaaggaacaccaccagcaagagacctcacactcacagacctcagagatattcatggcctgaggggcacaaaggagagtgtgttgggagcggatccccacttagaaagaagcaagacagtgccccaaggcctggaagatgtcagctgcttcctctgtgctgtgctgtggggaaggccatcaccgttttaacgcctcttggtgagtttttccaaggaaataaagcacttgaattcttagtattttgaattacggtgcacttaataaatattaacttctttttgttttgttttaagatggagtctgactgtgtcacccaggctggagtgcaaaggcaaaatctcggctcactgctacctctggctccctggttcaagagattcttctgcctcagcctcctgagtagctgggattacagccacctgccatcatgccaacctaatttttctacttttgtggagatggggtttcactatgttggctaggctggtatgaattgctgacaccaggtgatctgccctccttggcctcccaagtgctgggattatgggctgagccaccgcacctggacaatattaacttttttctttcattctcctgtacatttctaattggcagtgagagtagtgaatgttctgacaaagagtgatgaaaggatttgggataaccatcattttccacatggattatgaagatggctttgcaggacatggggctcccccctgtaatctcagcactttgggagctcaaattgggaggatgacttgagtacaggcattcaagaccagcctgggcaacagtgagacctcgtctctacaaaagataaacaaaatgagccaggcatggtggcacacacctgcgtttccagcaaattgggaggctgacatgggaggattgcttcagcctgagaggctgagcctgcagtgagctgagattgcaccactgcacaccagtcttagaaacagagtgaggccctgtctttaaaaagaagaaacaaaaaaaaaaaaaaaaaagaaaaagaaaagaaaagatggctgttcgtgttttatcctgcacaggcattctttttctgatctgcactgcagttctgagccaggtatattctgctgagctcattttccagctgccttgtgtcttgtttcagcagcacccagaataccaggatctttctcagcatctttctcagcagcacccagaataccaggtggcacgacccaggcactcagtggaagttttcttgttgttgttcttgttgttgttgtttcttgaggtagagtttcgctcctgttgcccacccagcctggggtgcaatggctctagctcaactcgccgcaacctcggcttcccgggttcaagtgattatcctggaaccacgcctgactaataggaagggggaagcactgggcgttgagagtgtgaaatgtaccaaaatcttctctgttttttccccagagtctcccccttcagcaccacctgacaatcctcagccctggacaatgtgagatttttttgaccgaggatcactgtgctccttcaggatccaccagaaagtgctggttagcctgataggccctggtttgacttacatctagcaagaccttcatctggtttgcaggagtagatagggggtcacttggatgacagggactccagtccagaccccattctccctcattccctcctgcaaagttcaatcctcacagtcctctgaggctgtggcaagtgcagaaacagaactgcgcctatccaaagtgcctcccttcccctggactcatgccaaggcttcctccctctgacctgtcccttgtctttgcatctagggtggatgcttgccactgaccctctctccccaggtttccctgctagactgactttctgccgctgggattgggtggggcagccaatggaacctcatgcagaccagggtgaaatcaaagggccttggaaactcacagccccacatccaggccccagtcctttcagagtctcagatccaagtccccagtttatcagggatgtggctctgtgaaagccagagaacccggtccccagggctgctgccatctctctcctcctcatttactctggcccccatcagctcctctgggccactccctttctggagtccccctggctccatccggcggcagtgagttcgcagatctcccggaccccaggctgctacaggcacctccctcaacatccactgtctgctctcagagtgaccttctcctcatatctttattggaggaaaaaagaggggaagcccctggtcttggggaagatagttataaatgcaatctggaataaaacccccttgaggactagaggaggccagcagggcctgaccagagatttttgactgttagaaatgcacagagggcaaacaccacaggaaaagcgctgactcagaaacagactcactgcattccaggtgcagcctcctcagctctaaggctgggccagcagagcctgggaagggatggcccccacactgggaccatcccaggctctgccaacagcctggcacttctaggagaaccagaggagtcggctcttcctgtgcaaggtagacaaggttcccctccattggtcccggttgcctctttaggtccagagcagcagctgaggagctccctgctttatgccttgctgtgggcactgaaatagctcagtagaatttggggagaatgtatgagtcactgctgattccagggagagtgtttcttagcattgtttgtggccatactcctgggtgcaggagagattggctgacatttccaggaagcagaggactcagcttctctgacagctcaggctgggggaggaaaatgcaagttcagaaatactttagaacccccgatgaaaagcctggagaagctttggaatcccagtagaaattcagtgagtggaactgaggttaagccatcccttcagatggactcaaaaggctgcactgacctggacagcagaggagcaccttcagaagcacaggcaaccagaacatggtagaaagaccccccaaactgcaggattctcgctggggtcctgaggatggtgcaggatttccccaaggggttcatttctctcacaaattctgcagatacacagcttccaccattcatgcttccagatcgaaaagtctccctctttatgtctgaccacactgctcctctctgggctctgccccagctcacacactcagattcactcttcccaagctggtattctgagggaagcccaacacgtttgtgagtaatgatgcctcaccttcaagtaggagccaagactgtgtctgctctctctgccctcaaagacactgtgatgctttaaggatctgcattatctcttttgtaattatgtttttttttaaatttttaaactcaatctagaaggaagtctttcaatccttttgtctaaatgcccacaaaatacctgccatgttttatgttgtctagcttccctcccagggtcccatgaaaacactcagtcctgtccagcccagcccccacatcactttgtaatttaggcctgatttctttcagtgaatccttgaccttaaccttgagataaattacaccctcagtagttcctgttttccacctgaatgggcatatgatctaccatgttaggtagcacaaaacccaggtgacaagtggatacaccaagatttttattgtgtttttcagggatgacatcactgtcttcttaaagttgttttaactctaaaacattttgatgcttttgatgtggccaaaggttctctaataaagataccacatatatatatatttttttttctaatgtcagaaacagcttaaatccttccctgtatcactatgaaagtcacatattagtcaaactttaccagtgtttatggaataagtgaataaatgagttttagaccttcaccctattattaattctttcacttttatgaatctatatctaatttaatcacttaataagaagaaagttgaaaactcaatcagggttaactggatggaagttcaggatctagttggatgtcatttttggattggaagttggtaattgagaagggggtcgtggtgagaaaggtcaataaaagctcctgaagatgcacagaagagacccaaagccctggctcctggagctactgcttgattctggcagaggtcccagcaccctgcaacgtgagtccagatctggcaagtcaccacttattaggattgggaatgtgcccatttgatctgatcttctgtatagcacgtcatacaaaaaagtctggaagacgctagcacatacactgtgaagggaagtcacagataaggggaagattatagaagacatttgctctgtgtttttggaatgttttgcattgagaattctgtccagagaagggaaaaaggatgaaaatcaaatgaagctcacccccatgtacctctatgtacctcttaccatgctggactttcttttgttttgttttcttttctctttttttttttttctgatatggcatctagctctgttgcccaggctggagtgcagtggcatgatcttcaatcactgcaacctccacatcctgggttcaagcaattctcctccctcagcctctccagtagctgggactacaggtacatgccaccatgcctggttaattttttttattatactttaagttttagggtacatgtgtacaatgtgcaggttacttacatatgaatacatgtgccatgttggtgtgctgcacccagtaactcgccatttaacattaggtatatctccaaatgatatccctcccccctccccccaccccacaacaggcccctctgtgtgatgttccccttcctgtgtccctgtgttctcattgttcaattcccacctatgagtgagaacatgcagtgttcggttttatgtccttgcgatagtttgctgagaatgatggttttcagcttcatccatgtccctacaaaggacatgaactcatcttttttatggttgcatagtattccatgttgtatatgtgccacattttcttaatccagtctatcattgttggacatttgggttggttctaagtctttgctattgtgaatagtgccgcaataaacatacttgtgcatgtgtctttatagcagcatgatttataatcctttgggtatatacccagtaatgggatggctgggtcaaatggtatttctagttctagatccctgacgaattgccacacttacttccacaatggttgaactagtttacagtcccaccaactgtgtaaaactgttcctatttctccacatcctctccagcaccccttgtttcctgactttttaatgatcaccattctaattggtatgagatggtatctcattgtggttttgatttgaatttctctgatggccggtgatgatgagcattttttcatgtgatgatgagcattttttcatgtctcttttggctgcataaatgtcttcttttgagaagtgtctgttcatatccttcacccgcttttggatggggttgtttgttttttttttgtaaatttgttggagttcattatagattcttgatattagccctttttcagatgagtagattgcaaaaattttctcccattctgtaggttgcctgttcactctgatggtagtttctttttctgtgcagaagctctttagtttaattagatcccatttgtcaattttggcttttattgccatggcttttggtgttttagacttaaagtccttgcccatgcctatgtcctgaatggtattgcctaggatttcttctagggtttttatgtttttaggtctaatgtttaagtcttgaatccatcttgaattaatttttgtataaggtgtaaggaagggatccagtttcagctttctacatatggctagccagttttcccagcaccatttattaaatagggaatcgtttccccatttcttatttttgtcaggtttgtcaaagatcagatggttgtagatatgtggcattatttctgagggctctgttctgttccattggtctatatctctgttttggtaccagtaccatgctgttttggttactgtagccttgtagtatagtttgaagtcaggtagcgtgatgcctccagctttattcttttggcttaggattgacttggctatatgggctcttttttggttccatatgaactttaaagtagttttttccaattctgtgaggaaagtcattggtagcttgatggggatggcattgaatctttaaatttccttgggcagtatggccattttcacaatattgattcttcctacccatgagcatggaatgttcttccatttgtttgtatcctcttttatttcattgagcagtggtttgtagttctccttgaagaggtccttcacatcccttgtaagttggattcctaggtattttattctctttgaagctattgtgaatgggagttcactcatgattttgctctctgtttgtctgttattggtgtataagaatgcttgtgactttgcacattgattttgtatcctgagactttgctgaagttgcctatcaggagattttgggctgagacgatgggattttctagatatacaatcatgtcatctgcaaagagggacaatttgacttcttcttttcctaattgaatatcctttatttccttctcctgcctgattaccctggccagaactttcaacactttgttgaataggagtggtgagagagggcatccctgtctggtgccagttttcaaagggaatgcttcccatttttgtccattcagtatgatattggctgtgggtttgtcatagatggctcttattatcttgagatatgtcccatcaatacctaatttactgagagtttttagcatgaaggtttttgaattttgtcgaatgccttttctgcatctattgagataatcatatggtttttgtcgttggttctgtttacatgctggattctgtttattgattttcatatgctgaaccagccttgcatcccagggatgaagcccacttgatcatggtggataagcttgttgatgtgctgctggattcactttgccagtattttactgaggatatttgcatcgatgttcatcagggatattggtctaaaattctctttttttgttgtgtctctgccaggctttggtatcaggatgatgctggcctcataaaatgagttagggaggattccctctttttctattgattggaatagtttcagaaggaatggtaccagctcctccttgtacctctgatagaattcgactgtgaatccatctggtcctggactttttttggttggtaagctattaattattgcctcaatttcagagcctattatggatctattcagggattcaacttcttcctggtttagtcatgggagggtgtatgtgtcgaggaattaatccatttcttctagattttctagtttatttgcatagaggtgtttatagtattctctgatggtagtttgtctttctgtgggatccgtgatgatatgccctttatcattttttattgcatctatttgtttcttctctcttttcttctttattagtcttgctagcagtctatcaattttgttgatcttttcaaaaaaccaactcctggattcattgattttttgaagggttttttgtgtctctatttccttcaggtctgctctgatcttagctatttcttgctttctgctagcttttgaatatgtttgctcttgcttctctagttctttcaattgtgatgttaggttgtcaattttagatcttttctgctttctcttgtgggcatttagtgctataaatttccctctacacactgctttgaatgtgtcccagagattctggtatgttgtgtcttttttctcattggtttcaaagaatgtctttatttctgtcttcatttcgttatgtacccagtagtcattcaggagcaggttgttcaatttccatgtagttgagcggttttgagtgagtttcttttattattattattatgctttaagttttagggtacatgtgaacaacgtgcaggtttgttacatatgtatacgtgtgccatgttggtgtgctgcacacattaactcgtcatttagccttaggtatacctcctaatggtatcctatgcagccataaaaaatgatgagttcatgtcctttgtagggacatggatgaagctggaaaccatcattctcagcaaagtatcacaagcacaaaaaaccaaacactgcatgttctcgctcataggtgggagttgaacaatgagaacacatggacacaggaaagggaacatcacacactgagtgagtttcttaatcctgagttctagtttgattgcactgtggtctgagagacagtttgttataatttctgttctcttacatttgctgaggagtgctttgcttccaactatgtggtcaatttttggaataagtgcagtgtggtgctgagaagaatgtatattctgttgattttggattgtgagttctgtagatgtctattaggtccgcttggcgcagagctgagttcaattcttgtatatccttgttaactttctgtctcattgatgtgtctaaagttgacagtggggtgttgaagtctcccattattattgtgtgggagtctaagtctctttgtaggtctctaaggacttgctttatgaatctgggtgctcctgtattgggtgcatctatatttaggatagttagctcttcttgttgaattgatccctttaccatgatgtaatggccttctttgtctcttttgacctttgttggtttaaagtctgttttatcagagactaggattgcaactcctgcctttttgtgttttccatttgcttggtagatcttcctccatccctttattttgagcctatgtgtgtctctgcacgtgagatgggtttcctgaatacagcacactgatgggtcttgactctttatccaatttgccagtctgtgtcttttaattggagcatttagcccatttacattttagggtaatattgttatgtgtgaatttgatcctgtcattatgatgttagctggttattttgctcgttagttgatgcagtttcttcctagccttgatggtctttacaatttggcatgtttttgaagtggcttgtaccagttgttcctttccgtgtttagcacttccttcaggagctcttgtggggcaggcctggtggtgacaaaatctctcagcatttgcttgtctgtaaggaaatttatttctccttcacttatgaagcttagtttggttggatatgaaattctgggttgaaaattcttttctttaagaatgttgaatattggcccccactctcttctggcttgtaaagtttctgccaagagatccgctgttagtctgatggggttccctttgtgggtaacccgacctttctccctggctgcccttaacattttttccttcatttcaactttggtgaatctgacaattatgtttcttggagttgctcttctcaaggagtatctttgtggcattctctgtatttcctgaatttgaatgttggcctgccttgctagattgggaaagttctgctggataatatcctgaagagtgttttccagcttggttccattctccccatcactttcaggtacaccagtcagatatagatttggtcttttcacatagtcccatatttcttggaggctttgttcatttccttttattcttttttctctgaacttctcttctcacttcatttcattcatttgatcttccatcactaataccctttcttctagttgattgaatcagctactgaggcttgtacatttgtcacgtagttctcatgccatggttttcaactccatcaggtccttcaaggaattctctgcattggttattttagttagccattcttctaatttttttttcaatgtttttgacttctttgccatgggttcgaacttcctcctttagctcagagtagtttgatcatctgaagccttcttctctcaactcatcaaagtccttctccatccagctttgttccattgctggtgaggagctgcattcctttggaggaggagaggcactctgatttttagagtttcccatttttctgctctgttttttccccatctttgtggttttatctacctttggtctttgatgatgctgatgtacagatggggttttggtgtggatgtcctttctgtttgttagttttccttctaacagtcaggaccctcagctgcaagtctgttggagtttgctggaggtccactccagaacctgtttgcctgggtatcagcagaagaggctgcagaacagcgaatattggtgaacagcaaatattgctgcctgatcgttcctctggaaattttgtctcagaggagtacctggccatgtgaggtgtcagtctgcctctactggggtgtgcctcccagttaggctactcaggggtcagggacccacttgaggaggcaatctgtccgttctcagatctccagctgcatgctgggagaaccactactctcttcaaagctgtcagacagacagggacatttaagtctgcagaggattctgctgccttttgtttggcaatgcccggcccccagaagtggagtctacagaggcaggcaggcctccttgagctgcagtgggctccacccagttccagccacctggctgctttgtctacgtactcaagcctcggcaatggcaggcgcccctcccccagccttgctgccgccttgcagtttgatctcagactgctctgctagcaatgagtgaggctccatgggcataggaccctctgagccaggcatgggataaaatctcctggtgtgccatttgctaagaccattggaaaagtgcagtattagggtgggagtgacctgaatttccaggtgccgtctgtcacccctttctttgactaagaaagggaattccctgaccccttgcccttcccaggagaggcaatgccttgccctgctttggctcatgctcgatgcactacacccactgtcctgcacccactttctgacactctccattgagttgaacctggtacctcagttggaaatgcagaaatcacccgtcttctgcactgttcatgctgggagctgtagactggagctgttcctattcggccatcttggctcaaccccctagttaatttttgtgtctttaatagagaaagggtttcatcatattggccagagtcgtctcgaactcctgactgaagtgatccacccaccttagtctctgaaagtgctgggattacagatgtgagccactgtgccttgtcaattgctggactttcatgatacacatacagtatccacagtatcacaagggccattttttccataatccaatttatttatattattggtagtgagctaatgttgatgtccccaaggtagcaatttagtgactatacccatgataaacgtttccatgcatcacgtggtcaacagcatttgctaccaagtgccacgttccatgctcagcagtaggaacataggatgattgagacaaagttcctgacctttagcagcaatatcgaacaagtgagattgtcaagaaagaagaaatcattgtaaaacataccatacccctacaattccgtaatcatgctcctggatatttaatgaaatgagtaaacccacacctggatgtttatagcagcttattcataatcactaaaacctggaagctagcaagttggccttcagtcagtgactggataagcaaactgatccatccagtcagtgaactattatgaagccttaaaaagacatgaaagattcctaaatgcacgttattgtacaagtgaaagaaggcaatgtgaaaagactcatcctgttagacatttgcctttttctatggagatagtagaaagcccagtggttgtgaggggttgggagtacaatgggatgaatgggaagaggacagaggacttttaggggaacaaaactagtctccatgatgctctaatggtggatatgtgtcattatccctttgttaaaatccatagaatgtacaaaaccagcaatgatcccccatgtgaactatggacattgggtgataatgatgtgtccctgtggctcattgattgtgacgaatgctctgtgctggtgtgggtgctgatcctgtgggggtgctgtgtattgaagggggaagaaggtagatgagaactctgcagtttctgcttagtttttctgtgaatctaaagctgctataaagaaaaaaataggctgggcgtggtggctcacgtctatagtcgtagcattttgggaagctgaggtgggtggatcacctgaggtcaggggttcgagatcagcctgactaaaatgacaaaccctgtctctattaaaaaataataataattataatacaaaaattatccaggtgtggtggtgcatgcctgtaatcccagctactctggaggctgacacaggagaattgctcgaaccctggaggcagaggttgcagtgaactgagatcgtaccactgcactccagcctggatgacagaatgagactccatctccaaaataaataaataaataaactcaaggctgggtgcggtggctcatgcctataagggctcactcccagcaatttaggaggccgaggcaggtggatcgcttgagcccagaatttcaagaccagtctgggcaacatggtgaaacctggcaaaaataagccaggcatgatggtgcatgcctgtcgttccagctaccagggggactgaggcagggagatcacctgagcctaggaggtcaaggctgcagtgagccgtgatcatgccactgcactccaatctggacgacagagtgagaccttgtctcaaaataaaataaaatgaaataaactcaagatttttaaaaactgtaatgtttcctttcaaagataaaattgtattgttctaaatatattttaaagaagaaatgattattgttcagtgtctttaaaattagttttcaaaatctcatttgttttgacatttcaaaccaagttaagtattctttttctcaccctccttgggacggagtcttcctctttcacccaggctggagtgcagtggtgcattctcggctcactgcaacctttgcctcccaggttcaagcgattctcttgcctcagcctcctgactatctgggattacaggcacctgtcaccacgccaggctaattttttgtatttttcgtagagaccgggtttcatcatgttggacaggctggtctggaactcctgacctcgtgatctacccacctcggcctcccaaagtgccaggaatacaggcatgaaccaccacacctggccattaaccattcttaaaatatcacgttgcattctttcaaagttctaatctttcatacacataaattacaacacaaatagttatactctaatagtattcacactatagtaaatttttttttcatgctctgtcgcccaggctagagagcagtggcgcgatctcgtctcattgcaatcttctcctcctgggttcaagtgattgtcctgcctcagcctcctgaatacctaggattacaggcgaatgccaccactcccagcaaattttgtgtatttttagtagagacggggtttcaccatgttagcaaggctggtctcaacatcccgaggctgcctcggcctcccaaagtgctgggattagaggtgtgagacaccatgcccggccataataataaatgttattttatcttttttttgagacggagttttgctactgttgcccaggctggagtgcaatggctcagtctgagctcaccgcaacctccacctcccaggttcaaacgattctcccgcctcagcctatcgagtagctgcaattacagacgtgtgccaccacgcctggctatttttttgtattttaagtagagaaggggtttcttcatgttgctcaggctggtctcaaactcccgacctcaggtgatccacctgcctcagcctcccaaagtgctggaattacaggcatgagccactgcacctggctcataatagtacatttttaaaaacaccataaaatataatccttgcaacactcaattataccatctggtccgatctatcagcagatggcacccgagacatacggattggaaattttgatcttattatgaatgaatccagtccagaaatgcccaccctgccccctgctggctcctggggctctgctctttgggggaatcatgatgaaattgtggcagagagtagaagttgagccccattgcatgccctgagttcttgttgcctctctattatcaggaaaaggaggtgagattgaaagatgaaaaatgctgggacttctgctgagaagagaaaaaagaacaagatgtattgatcttactgtatgccagaccccatgccaagccctaaacatgaaccatctcattggatcctaccaaggtcccataagctgttggatatcatcatcctcattttacaggaagctgaggctctaggctaacatccctgacagcaacaccagcccctgagtacacagcaggatccttcacttgggtgcccactatgcaggcttcctcaccacagggaaggtcactcatcacccacaggcacttgatcgttatccaccctttgatgatgtcagattccagaacatgctgcactagtcacttccttcatagggagagagggaaggtgttatgagaaaatctctcatcaatctgacctagctccccaaaaagatgtaacttttaaaatgtcagatggaaatatttaaaaagtgttacatgcctgtatagttttagtattttacttaaagggaatgtggctgtctttactggctacaacaagtttaattcaagaagggctgctggtcatcaggggaacaagcaagggttggtgctgcccagagtctccagctaatatacaatatggacatccccttccagggcagcgggaagagactggctccttgtgcagtgaagctgacatccaccaactaaggcttctggaagcatgtggagactcacagggagtgggcagggtctcagcatctggctagcggtgaaagacgctgagaagaaggtgctttccgtgtggattggctcactgttcttgcccagcaatgttccaggcctttggtgtccacctagtgtgtattaacccactgaacagccacagaaactaacaaggagttaacagacatctaaagaagtgaagaactggaggaggccaagccaagcgtggtggtccacgcctatactccctgcattttgggaggccaaggcaggagaatcacaagctcaggagttccagatcagcctggggaagacagcgaggccttgtttctactaaaaaaaaagtatccaggtgtggtggctcacacagctgtagtcctagctactcaggaggctgaggtgggaagatcgcttgaacccaggaaattgaggctgcaatgaggtatgattgtgccactgcactgtagcctgagtgacaggagacctttaaaaaacaaaaacaaaaacaaaagcctgacacagtggctcacacctgtaaccccagcactttggtaggcctacttgcgtgaatcacccaaagtcaggagtttgagaccagcctggccaacatagtgaggaaaccctgtctctactaaacatacacaaattagctgggcatggtggtgcatgcttgtaatcccagctacttgggaggctgaggcaggagaatcatttaaaccccaggtggaggttgcagtcagctgagatggcaccattgcactctaaactccagcctgggcgacaagagtgaaactctgtctcaaataaaagaatgggaggaaactggttacaataaccaaatttcatttaaatgccttgattttcttgggctgcatcttattgattggacaactcagtcagtgccttttgttttttccatcaataactgaagattcctgaggcttaaactggaaaacaggttacttaataatggagggcaccagacagattctgctcagttttcctttatttctgattgtttctttacaaccatccatgcaagagtaactccctcatgtattctcaagcctgaattccactctagacattcagattcccattttcgactctacaggatacaggttcccaaagtcccatcgaatccatggcaacatttcccccaagtcctgcccctgcttgatcagctttcctttcccactttcagagcccatgtgtgaaacgatgggttctgtgctccctttaggatgtacctaagacctaggttttagtttccaagtgtccagaagaaagcgtttgacatacccatccaaataggcaggcattcaacagcagtattgatctgcctccaggtcataaaatgacctgtcgccatggtcagggcagttgtcagtacagaacaagatcctcttggggtgccttaagtgcctcactttcttcatcagctcagccctaatttgagcaaatctgctccagcagagagtaccatcagcaccataactttcctgcggggcaggatacagctccaggcataagtttttgagtatgattgtgtggctcagcaggttctccagggtggccatgcagatgggatttccacagaagctgaaggtgttgagctcaaagcagcggctcagggcaggcaggatggcgttgacttgggagtctatgatgccacagtcatctaaatccaggtactcaagggtggctgcaactttttctaggagaatttggagaggcacaagactgtaattggtcagtctgatgccactcaggtccagggtctttagttgactgatactcgggcactgggagagatgcttcaagtctgattccaaaagcacacagttagttattgtgaggacctttaacgaggtcttcagacagctggggagagagagcaagaagttaattctggggaatcataggggtgagtggagggtggtggggaatggcttcaaggtaatggatggagaccattttgcccaagtccaggatcattctcatggccggatggtcaacacttcggatgatgtgtgatgaagagctttgccaccgaggtcaattccactttaggcccggcccagtaactcacacctgtaatcccagaactttgggaggctgagactggtggattccttgagatcaggagtttgagaccagcctgctgaacatggcaaaacctcgtctctactaaaaatccaaaaattagccaggtgtggtggcgggagcctgcaattccagctacttgggaagctgaggcagaagaatcgcttgaacccaggaggtgtaggttgcagtgagcagagatcatgccactacactccagcctgggtgacagagtgatactctattaaaaaaaaaaaaaaggagaaaaaataattccatttcaggctgagtcatttcaccatcatttataggaatggatcaagttcacagaatccctaaagctccctttcctcatctgtcaggcagaaaaccacatccctgggccacagaagcccagtggagatgcaggcataaaggacaaacccagacaggatcctgcaacatcagctggggtgggcaggctgcaggcgtccctgacacacctgtatcatcagcaaaccatctatcactttcatcattctttgtgcctgctccctgaccctctgtttcagaatcatacatttcctaggtaattaatttacctggagctcaaaagaaacttttacaatgggaattagagatgggatcattcatgttcaccaaactgtggggcacaaagctgattttctgacatgtgcaggtttgctgagcattcccctcttcagtgcccacttcacttccctacttcacatcatcttcttaaaaattatcttgttggctgggcgtggtagctctcgcctataatcccagcactttgggagtccaaggtgggtggatcacctgaaatcaggggttggagaataacctggccaacatggtgaaaacctgtctctacttaaaatataaaaattagccaggtgtggtggcccacgcctgtaatcccaggtactcaggaggctgaggcaggagaatcgcttgaacctgggaggcagaagttgctgcgagctgagatgtcacaactgcactctagcctggatgatcaaagtgaaaatccatctcagaaaaaaaatttatcttgtttgattttacttttatttattcatttctgacaggggtcttggtatgttacccagactgctcttaaactcctaggctcaagctatcctcttgcctcagactcccaaactgctaggattacaggcatgagccaacgcccctggcctatttttcatcatcttaacttagacacacatcctcaggaagaattcagaaaggcaccctcactagatctgaaccccccagtagctagcttcctagcatggcagcctctctatagcatctcccctgactgatccctctgactctattgggagggttgcatgatacccatttcaggacagggccgccaacaggacaatgcatggacattctagtgtccccttcactgttacatcctcataggctggctcacagtagatgcccactagtgtttactgtaacaggctctgctgtggtctgcagagaaagctcaccaccctccctcacctgagcagctggtccaggtggccttcgaggaaagaaacagagttcatataaagcttttggaggcagcgcagcttgaggaactgagtggtgaactgggtaacaatctccttcttctgctctggggaaacgtagcgagagacatccatgtgggagagaacgagcttctgaagattcctcaagtggcccaggtatggggtaaactgtgtcaggatgggcagtatccacttgcaattcacttccacctcctggatacagtctaggttcaccattttcaggatgcttctgatattgcggaagggcattcccaaaattttcagcttcttacagcacaggtgtagtaaatctctcctctgcttgacccatagaaggaggcaggtgaggtattcatccagagtcctgttcttgagccaaagttctacaaacacagtcaagggctgccgttctctcatccttggacagtcctgcactggtgttttgttcctcttggcattgaggaagcacccatgggccatagcttcagaccaaaccatccagaagttctcacagacatcctgtaaatccagcacttgaagtttccatctcctgtgggaaaatagaggtgagactgagaatttaagaactcatttctgaacttaaactccacatcctgcatagcagctcctcccctccctgcttgttgtccctctctctgagttttcttcaccctgttttccccttggatcctacccacttccacatttttttgtttttttttttgagaccaagtctccttctgtcgcccaggctagagtgcagtggtgtgatgtcacctcactgcaacctcttcttcccgggttcaaatgattctcctgcctcaacctcacaagtagctgggattacaggaacccaccaccatgcccagctaattttagtatttgtagtagagttggggtttaccatgttggacaggctggcctccaactcttgacctcagcctcccaatgtgctgggattacattgtgagccaccgtgcccggcccagttctcacttttcatggtgcctttcagtgccattagaggagaggttcctgttacctctatggaccttgcctggtgagcagtgctttccctgaggagctggtgaatggccaagtcctctcggcttcctcaccaccaccatcccccttgggcctcctcacttcacatgacccagctgttccttcagttggacacctgggccctccccaccagcccacctgggccacctcacctgggacgaaccccttgggtaagcagtgcatcaagcccatcgagcacagcttggaaggcctccagacaaggcatctttatcagaggcctcagagggaggcggcggaagggccaggcctgcaccatcagcttcagggcctcacagcgtctcctgctgaaggcctccatgaacagtggggggaaaagttccgtgggcagctcctccagggtggagacggccaaggcttggtccctcagcaggctccgcccgcaagctccaggagtctgggtggaatccggatgctcatcttcatgaatctgcagggaaaacttccagaggacaaacccagagaaaaggcatcactctcaggccaagcccatgcaatctcatcttctcccagggccaaagtcactgctctggcaatggtgaaacagccctcagtttactccaattctactctgtactcagtggccattaagccagcattctgcctctgctgcatcaccatgagcgtctccgaagcagtgaggaagcagggccaccactagcccttcctttctatccagtgctccatccagtgactagtgagtgtggaggaacctgaaagtgaacccctcctaccattgggggaaattattaattacttaaggttctaaaacaatgggaaagggagtgtcacaagcctacatgcccacaatttcagttcctaaaaataagcttgttgggaacattcatggggcatccctagaacaggttctatttgttttcttttcattatttaagcttgctttctctttctctctttcttttttccttctttccctctctccctcccttctttctttcctcctctctctcccttctttctttcttgtcttctttccctgcctcccttctctcattctctctctctttctctctctccctctctcactctctttctgacagggtcttgctgtcacccagcctggagtgtagtggtgggatctcagctcagtgcagccttgacctcccagctcaaaggattcttcctcctcagcctctcaagtagctgggaccacagttatgcatcaccacacccagctcatcttttattttttgactttttgtaaagacagtggatttcgctatgttgtccaagctggtcttgaactcctagtctcaagcaatctacccctcttggcctcccaacatagtgggattataggtgtgagcctccgccccagcctcattattgaaaatttcagtgagatgcagtggtctccgcctgtagtccaagctactagggaggctgaggtaggaggatcacttgaacccaggaggcagaagttgcagtgagctgacattataccactccactccagcctgggaaataggctagattgaacagagagacagagagagctacatttgattagaattcttaatctctacccagttaatcctgattggatttttgactttcttaaatattaactgatcgaattagatattcatccatcaaaatgaaagatttagggatagggtgaaagtccaggactcattcactgattcccttcacaaacatggagttttactaatatgtgtccttcaaagtcctgagtgtgagatagggaagggttgaacctcttcctgatattagacagaaagaaagaaaacttgaaagtatctttgttgagggatccttggccatgtcaaatttatcaaaatatttcagagttaaaacagttttcaaagacagagatgacagtccctaagaaaacacagtagaaatcttcatatatccaaagatcacctaggtggcgtaattctttttggtgttgagggagctgaatctcacttcatcggccaggctagagtgcagtggtgtcatatcggctcactgttacctcggcctccaagattcaagcaattctcatgcttcagccttccacgtagctgggactacaggcatgcaccccccacagccatgtctccatttgggtggaagaggatgtgattggtttaaaattaaggtcaaagatcctttttgattgattttgtttttgttttttggacagggtgtctctcttttgcccaggctggagtacaggagtggtatgagcatggctcactgcagcctcaatcttctgggctcaagtgattctcccacaccagccacccaaatagctgggactacagatgcatgtcaccatgctcggctaattaaaaaaaaaaaaagtagaggccaagcaccagtgactcacagctgtaatcccagcactttgggaggccaaggcaggtggatcacttgaggtcaggtgttcgagaccaacctggccagcatggtgaaaccccacctctactaaaaatacaaaaattagcgaggcatggtttcagatgtctgtgacaccagcttctgaggatggagactgaggcatgagaattgcttgaacccgggaggtaaaggttgcagtgagttgagatcatgccactgcactccagtctgggcaacacagtgagactccatccccaccctcaaaaaaaaaaaaaacgttgtgtagaggagggcttttgtcatgttgcccaggttggtctcaaacccctgggctgaaatgatcctcccactttggcctcccaatgtgttggggttaaaggcatgagtcactgctcccttcaagaattttgaaatgacatcaaccaaagcacaatcaacttttttgaaataaagacagaactgcatttagaggaaaaaattcaaagcttcaaattgttcatatgagaaaaaaaaaggacaggatatagctctgtgccatcgtaggctgcactgtcaccatcccagactgactgactgtaggtcagatgggagtgtccttacagaaattagtgacttaccagatctggatgtagtctagaaggtgctcagacctcaggaagaaccaagcaggaactccaggcttgaagactttgggtctctcctgtgggtctttagaagattttattgacctttctaatcacaactcccacccatgcccttccacgtttgcactgctagcttccaatcaaaaagcaatatctgattgcatttgtgaagctccacccagttaatcctgattgggtttttggctctccccagattaatggattgagtcagatatccgttcatatcacatatctatattcagttcgtgaagcaagaaattgacagtgttagggatagggtagaagtcaagaatacattcattcaagggtgggtgaggtggctcatagctgtaattccagcactttggaaggacaaggtgagtagatcacctgatgtcaggggttcaagacgagccaggtcaaaaaggtgaaaccctgtctctacaaaaatacaaaaatacaaaaattagctgggcatgatggcaggcacctgaaacccagctacatgggaggctgaggcaggagaattgcttgaacccaggaggcaatggttgcagtgagccagaattgtgccactgcactccagtctgggtgacagagggagattctgtcaaaaaataaaaaaatcattcattcatgaactccacaaacactgatggcattttactaatatgtgaacttcatagtcttgagtgtgaggcagggacggatttgatctgttacgacattagacagaaaaataaaatctgaaagtagtgttgttaggagatctttggccacatcaaaatataaaaatgctttctactttaaaaagctttataaaaacagaggagtcatccctacgaaatcagaataaaaatctcaatgtattgaatggtttttgggattttgtgtaacctaaggtagcagattacatgctcgttctggtggaggagaggtgccactgagggcgtgagtggtctcagggcttaggttaaggcttctttggaagaaattgaaaccacatctctaaagtttataaatttaatcagtgaagaagggagggagagaaacaaaaataaacgaagcttgcaacacattcagccttcatcaggaggtcttcttgctctctgacctggttcctcgtggttgctggcagcctactgttccaaaatcatatagaccttagattacagttccccttaacttccctgcagacaacgattcaagcattgtaaaacattaattttttcatctgagatattctttcaggttctgcatgtcagtgaaactgctgatgccagctgatctgaagggccatgcaatgcaccaactcaccaaagaatgcagtttctacatcctgttgacttcttccctcttaccgctaccccaactttccggccccttgctatccaggatccactggaaaccttcagtactccttggggagatgaatttgaggatctcctcctagcttctcattcagccaccttgtgatcattaaactctctgctgcaaaccctgctgtctcagaatattgctaagctactgtgcagcaggcataggaacctgatggtcctgtaataaagtcatgtcaaaattacaaatggaagtgagggtggagctggtcagggttgagctgggtttttaatgggaacctgggagtgaagcaagacttgctgaacatgttgggggttattgagtgggtgtaagaggaatctatctaacattgcactgatgcccttttggttttaatccttatgaccaagtatgagtctttcaaaacaatttgtataatcctccttatttttcctttcaaaaccttcaacttcctttatctccccaaataatctcgcatctattgccacttctttgcttacttcataataaacatttttttttacagagtcttcttctctgttaagtagaccatatattttgttgccactcaagatgagtaacatggttctatggacagaaagggtcaaaaggatcccattcctcaacagctgggggtgatgtaaaggtcatggttattctttgtcatatctgcacctgcatattgccagtgaaaacttgcaggtcacattgggcaggctcccaaattcaccacctgtggaaggtctttcgattggcttacatcctgtccctgagtaaagagtctgattgtgagttcatgagtgcttcaaactctacaagtattgatgaaggcttccacccactgacagtgagaaggcactgatttgatgctgatcatgaagttttgctggttgtcttgcaaggaatatgttttattcttttatcgtgtcatctaaagccaatgattgtaacctctgtattgtcccttccaatggaaaaaacaaaaacaaaaactcaactctatttgagccttgtcaggtcaataaaacaaaagaaaatttaaaaaaagaattgataggaggaatcccattcccagcctgggcaatagagtgagactccatctcaaaaggaaaaaaaaaaaaaaggccgggcatggtggtggctcacacctctaatcccagcacttcaggaggccaaggcaggtagatcacgatgccaaaaaattgagaccatcctagccaacatggtgaaaccctgtctttgctaaaaatacaaaaattagctgagcatggtggcgcccacccatagtactagctactcgagagactgaggcaggagagtcgcttgaactcaggaggaggaggttgcagtcagccaagatttcaccactgcactccaacttggtgacagagcgagactgtctcaaaacaaacaaacacaaacgaacaaacaaagaaaaaagctggaaaaataaattctgaaagaatttccatctgtatgaattcatcttcagaagtgatagcatttcctgcttggcattttttgcctacatttttggcataagatctatcaacaaaaagtatgaacccaggtttgtgtaatggaatatcttaaacatcaataggaggagtcaatagttctgatgccacacacacacatgtatggtcttctccaccatcagaaaatggcaacaaagtggtagagttatgcagagtgtagcatttgaaatggagatttgaaggtgacaaggaaaggattttgtaagacattagtgtacaagttgagcaatgttggttcctgtcacaatatttttattgatttatttattttattcatttattttttgagatggagtctcactgtgtcaccaggctggaatgcagtggcacgatctcagctcacttcgacctctgcctccccggttcaagcaattttcctgccttagcctcctaaatagccaggactacaggtgcatgccactacacctggctaattttttgtatttttagtaaagacggggtttcaccatgttaactaggatggtctcaatctcctgacttcgtggtctgcccgcctcggcctcccaaagtgctgggattacaggcctcagccaccatgcctggtcgattcacatcaaaatttaagaggtattcaattgcatatgaaacttgtaggcaaagtttatttcttttttctttaaagcattaattaatttatttatttataatgtatttatttattaatttttttttgagatagagtttcattcttgttttccaggctggagtacaatggtgcgatctcggctcactgcaacctctgcctcctggttcaagtgattctcctgcctcagtctcccagttagctggaattacaggcacagaccaccacacacagctagtttttgtatttttagtagagagagagtttcaccatgttgcccaggctggtctggaactcctgaccacaggtgatgcacccacctcggcctctgaaagtgctgagattacaggcgtgaaccagttagtgcctggcctaaactcatcacttttaatactttctacatcacatgaggaagaagagcagaaacacttgagtacttcatgaaggtcaaagttggtatgagtttgggttctaatatgatcaatttctgcttctagggaaccaagcagctcaggttaaggaaggtcaggaaactctagggttttctctccctccaaagaaagctttacgcatcaccttaacggagaaagcaaatctcatccccatgttgtcacttaataaaaagccatactttcctaaaaatggtccaaatgtcatttggaatgcttcaaacacaggaattttctgaacttcatgtgaaacccctcctcagaaatattttcctttctccaagggatttgctgatatattggctgtaaactggatatggcagccctggtttccaccaattctgtacctaagtctgcaatgatcttaatctcagcttctccatttttatttaaggctattatagaaaacaatttaccagagagttattttaaattccatcaatatggagacatcagaaatgtcctctagccagatgtggtggctcatgcctgtaatcccagcactttgggaggctgaggtgggggaataacctgaggttgggagttcgagaccagcctaaccaacatggagaaaccctgtctctactaaaaatacaaaattagccagctgtggtggtgcatgaatgtaatcccagctacttgggaagctgaggcaggagaatcacttgaactcaggaggtggaggttgcagtgagctgagatcccaccattgcactccagcctgggcaacaatagtgaaactctacctcaaaaaaaaaaaaaaaaaaggcagaaaagtaaagaaaaacaaaaaagaaatctcctctaatgtgaacaacctgtgggacaaaacattctgtccaatagagacctggtgcataggtggacaattttcattccaatggcctgtttcaaaggtggcaggcaactctagcagggtttctgtgtttacaccaaactggatttgagttttaatagtaaggggagttcccccataaaaaaccaacagaaaataatggatgctatgaagaatatggagaaatgagaaccctggtacaacattggtagttatgtaaattagtacagctactatggaaagcagaatggagcttcctccaaaaaataaaaataggattaccatataaaccataaatcccactgctggacatatatccagaaaaaaaaaaagtaatatatccaggagatatctacactaccatgttggtcaggctggtcttgaactcctgacctcaagtaatccacctgcctcagcctcccgaaattctgggattactggcatgagccactgcactcagcctgcactctcctatttattgcagcactatccacaatagccaaaatttggaatcaacgtaagtgtccatcagcagatgaatggatcaagaaaatgtggtaaatatacacaacagaatatcactgagccgtaaacatgaaggaaatccagttatctgcgacaacatggaaggaactggagggcgttatgttgagtgaagtaagccagatacagaaagacaaacatggcatgttcgcactcatatttgggaattaaaaaacatgaaacttaaaaatagtaaaatgatggttatcagaagctaggaagggtactgggaaatagagaataagaaggggatggttaatgggaacaaaaacacagacaggaataagatctagggtttagtagcacaatagggcaactcatgttgacaatagttcgtagtaaatttctacataattaaaataatggaattggaatgttgctagcagaaagaaaagataaattcttgagatggtggatatcccagttaccatgatttgaatattacacattttatgcttgtatcagaatatcaggccaggtgcagtggctcatgtctacaatccaagcactttgggaggctgaggcaagtggttttcctgaggtcaggggttcgagaccagactggccaacatggtgaaaccccctttctacttaaaatacaaaaattagccaggtgtggtggcggtcccctgtagtcccagctactcaggaggctgaggtaggagagttgcttgaacccaggagggtgatttctagagacttctgatacataaatgtctaaaacaagttgatcaatcgtggaagacaccagaaagtttccattcaggttccatttatttttgacatttttaaataaccatccttgcggtggcaactcctgcatcagtctagaacttcaggctccatttctgagtctagaacacaggtccctgaaggcctcattgattccaagtcagcatttttacccagtcctgcccccggctgagtcacctttgtttttccactcgcggtgagcacgtacctgaaacacacagctgtgtgcttcctttaagaaacggctgaccgggcccagctgcacacacttgtaaacctggaactgtggaaggccaaggcaatcagatcacttgaggttaggagttagaggccagcctccgccaacatcgtgaaaccctgtctctactaaaaatacaaaaattagccgggcttggggcccacacccataacaccagttacttgggaggctgaggcaggagaatgacttgaacccaggaggtaaagcttgccatgagctgagattgtgccactacacttcatcctgagggacagagtcagactctgtctcaaaaataaaataaaataaaataaaaatataaaaaattaaattaaattaaaattaaaaatgcacccatgtacaagattttagttcccaagtgtccggaagaaagcttatccatcccactaaccaggccttccctaggagcacatggaactccagtttctcagatggccatgagccacaggaagggcagggggtgggaccgaagaagatcctcctgaggccaaggcgggcggatcacgaggtcaggagatcgagaccatcccggctaaaacggtgaaaccccgtctctactaaaaatacaaaaaattagccgggcgtagtggcgggcgcctgtagtcccagctacttgggaggctgaggcaggagaatggcgtgaacccgggaggcggagcttgcagtgagccgagattgtgccactgcactccagcctgggcgacagagcgagactccgtctcaaaaaaaaaaaaaaaaaaaaaaaaaaagaagatcctcctgttctgcctgacttccctgagtgtacgcatcagctcagccctaattggggtgaggatctcccaattggcatgacccctgttgtcaagacactccagaggggcaggatccatgtccaggcctaacttgctcagcccgcctgtgtgacgcagcaggtctttcagagcattcgtggaggtctcatttccatgaaagtagaaggtggtgagctgggaacagtggctcagggcaggcagggggaccctgagttggggggcctggatccgacagtcctctaagacgagggtcttgagagtagcagcaactttctccagcagaactccaaggggctcaagatgggtggtccacattaggatatgaatcagacgcagctcctttagctgactgaggcttgggtactgagacagacactccatgtcccgatcagctaggtaagcatcactgaatgtaaaggcccccaaggggttcttgaggtacctggggagagcaagaagttagttatgggcaatggtgccagttagaggaggggggtgggaaatcatctcaatggtaaacttgaagtgggcattgagtaattctgcaccttactaccacacaggtgttatagtaactgcaatggggaagcctgtttcacccaaacacaagtttgttcccatcaccagatgatggtctgcatgcaaggtgctgcctgatgaagactcagatcattcaggggcagctccattttaggctcagtcctttcagcctcgcttgtgtgattggtaccactctcacacctactccctcaccctccatcccagaagcatgcacttcccgtatcaattacctttcctggagttcaaaacaacctttcacagacaaggaattacagacaggatcattggtgtttattaagctgctgaggacggagcttctactgtgaaatgcacaggtttcatgcactttcccttcttctttttcttttcttttctttttttttttttgacacagagtctcacattgtaacttaggctggattacagtggcacaatctcagctcactgcagccttcacttcccttgcctcagcctcccaagtagctgggattacaggtgcctggcaccatgctcagctaaattttgtatttttaatagagatagggattcactgtgttggtcagggtggtctgaaactcctgacctcgtgatctgcctgcctcagccttccaaagtcctgggattacaggcatgagacatcacaccagactgcactttcccttctttcataccctcttctttatgaagaatacgttttcatcatattaactttatacacacttcctaaggaggaattcacaaatgccccttcactagatgtgaatccccaactaactagctccctatacatctctctctgtagcatctaccccaggccatccctctgcccttatttgagtggtcttgtgataccaacttcaggatatagagcactgaacagcttaatgagttgacattctagcatcccattccctgtgacatcctcagtggatggcacacagtagatgcccactaacatttactgtgaaaaagaacaaaagtctgtgttatggtctgcacagaaagcccaccatcgtttcctacctgagcaggtgctccaggtgctctttgatattactgacctttcttatataatgcatctgggggtagtacaggcacaggaatggccaatccaagtcaggaatgaactgccattggccgctcacgtataattcaggctcataaccgaaggctaaaaagtttgcaaagattgctcatctggctcaggtaaggggcaaactttcccgttttattgagagagcactttttccagacttccaactcctggatactatctgggtatatcctttccaatagatttctgaaacttgaagtgggcattgagtaattctgcaccttactacaacacaggtgcactaggcctcttctgtagtggatccaccttcagaggtagctcaggcattcatgcagtgtactttccttcaggcagaggtctatgaacaccttcaagggctggcactctcccatccttggacagttctccactgtctgcctcttactcatggcctctggggagcaggggaggaccctgactccagaccatatggtccagaaattctcatcaacatccctcaaatccagcacttgaagtttccacctcctgtgagtaacataagggaaaagctcagaatgtaggcaaggaccgacccttgacctgaactttcactccgcatccaggacatgagtcagctgctcctgtcccagtgctcctccttctgtcttttctccatcctgttcccccttggattctgcatggtacccacttctagtacctttaccttccactgggaggaagcaggttcctgtttcctcagtggaccctgtatggtaagcagtccttttccagaggatctgggcaatggccaaggcttctcatgggcaccatcagaagcctctgagccaccctagctcccacacactgccactcctcctgagccagctgtcccttccctggatgtctggacccttcccaccaggccacctgagtcacctcaactggggcaaaccttctgggacactagtgtatcaagtcccttcagcacagcttgcaaggtctccagatgaggtgtcttcatcagggatcccagagggaggtgaagggagggccaggcctgcaccatcagcttcagggcctcacaacatctcatgctgaaggcctccatgaacagaggggagacctccctgggcagctcatccagggtgaagatagtcaagaactggttcctcagcaggctctgccctgccagctccaggagtctggatggggtctggaggctcattctgacaaatctacaaggaaaaactctacagcacaatccagcaaaaaggcaagttcctcagaccaatcccctgcaacccccaattctcccagggccaaagtcatttctctagcgtgtgtgaaagagcccttagtttactccagttcctttctgcaataagtggccacagagacacagttctacccttctggtaccatgaagaatgtgtcccaacttctaaagagcaggcaagatccctcgtagtccatgaattattagccactgatccactaaactcatagcactggcaaatgttaccgaggatctctgaagctcagatctcgtacccagctaatcttttattttttgactttttgtaaagacagtgggtttcactatgttgtccaggctggtcttgaactcctagactcaaacaatccacccactttggcctcccaaagtgctgggattgcaggcatgagcctctgcctggtctcattattgaaaatttcagcgagaagctttgaaagctatgtgacagtgttatgcatcattggcaagacacagatgtttccaatacacacctctcacacatattcaaaatgaaccactttggctgtgtgcagtgactcacacctgtaatcccagcactctgggaggcagaggcaggtggattatccgaggtcaggagtttgagaccagcctggccaacatggtaaaaccctacctctaccaaaattagaaaaattagcaaggtgcagttgtctgtgcctataatccaagctactagggaggctgatgcaggaggctcgcttgaacccaggaggcagaggtcgcagtgagctgacaatactccactgcactccagcctgggaaataggctagattcaaagaaaaaaaaaaaaagaaaagagagagaactacatttgattcgacttcttaaactctacccagttaatcctgattggatttttggctttcttccagattaactgattgaattagatattcatccatcagagtgaaagatttagggatagggtgaaagtccaggactcattcactgattccctccacaaacatggaggtttactaatatgtgtccttcatagtcctgagtgtgagatagggaagggttgaatctcttcctgatattagatagaaagaaagaaaacttgaaagtatctttgttgagggatccttggccacatcaaatttatcaaaatttttcagagttaaaacagttttcaaagacggagttgacagtccccaagaaaacacaatagaaatcttcatgtatccaatgatcacctgggtggtataatctcattttttttggtgtgggtgaagctgaatctcactttgtcgcccaggctggagtgcagcggctccatctcagctcactgtaacttccgcctctgagattcaagcaattctcatgcttcaaccttccacgtagctgggattacaggcatgcacccccacacccatgtctccattcgggaggaagaattacagtgaggatgtgattggtttaaaattaaggtcaaagattctctttggttaaggttttttgtttgtttgtttttgttttgtttttgtttttagcagggtcttactctgttgcccaggctggagtacagcagtggtgtgagcatggctcactgcagcctcaatcttctgggctcaagtgattctcccatgtcagcaaaccaaatagctgggaatacagacgcatgctaccatgcctggcaaattaaaagatatatatattttgtagaggctgaccaccattggctcaaggctgtcattccagcactttggggggctgaggcaggaggatcacttgatgtcaggagtttgagaccaacctggccagcatggtgaaaccccaccactactaaaaatacaaaaattaagcaggcatggtggcagagggatgtaataccagctactcaggaagctgaggcatgaaaattgtttgagcctgggaggaagaggttgcagtgagttgagctcttgccactgcactccagccttggcaacagggtgaggctccatccctgcttcaaaaaaagaatgttttgtagagctgcgtttttgccatgttgcccaggttggtctcaaaccgctgagctcaaatgatcctcccgctttggcctcccaaggtgttgaggttatgggcatgagtcattgctctcatcaagaattttgaaatgacataaaccaaagcacaatccaattttttgaaataaagacaaaactgcatatagaggaaaaaattcaaatcttcaaattgttcatatatatatataaaagacagatatagcttggtgccatcataggctgcactgtccctgtcccagaccgactgactataggtcagatgggagtgtccttccagaaatgagtgacttactagatctggactgagtttgcagcatgcttagacctcaggaagaaccaagcaggaactccagacttgaagactttgggtctctcctgtgggtcttcagaaacttttattgatctttctaatcacaactcccacccacacccctccatgtatccagtgcttgcttccaatcaaaaagtgctatctgattgcatttctgaagctccacccagttaatcttgattgggtttttggctgtccccagattactggattgaatcagatattcattcatatcagctatccatattaagttcatgaatcaagaaattgacagtgttaggaataggttggaaatcaagaattcactcattaaaggccgggtgaggtgggtcacacctgtaatccctgcactttgagagtccaagttggctggatcgcctgaggtcaggcgatcaagacctgcaaggccaacatggtgaaaccccatttctacaaaaacacaaaaattagcctggcatgatggcaggtgcctgtaatccagctactcaggaggctgaggtgggagaatcgcttgaatcccggaggcaatggttgcagtgagccaagattgcaccattgcacaccgttctgggtgacagaggtagactttgtcaaaaaaataaaaataaaaagaattcattcattcataaactccacaaacactgatggaattttactgatatatgacctatatagtcctgagtttgaggcagggaagggtttgatctgttccggatagtagacagaaaaataaaacctgaaagtagtgttgggagatctttggccacattaaaattataaaattgttttatagttaaaacagctttataaaaacagagaagtcatccctacaaaatcagaaaaaaaatctccatgtatcgaatggtcttgtgggttctatatcacctaaggtagcaatttatttgctcacgctggtggaagagaggtgccactgagggcttgagtggtctcagggcttaggttaaggcttgtctggaagaaattgaaaccgtatctctaaactttataaatttaatcagtgaaaaagagagggggaggaacaaaaacaaaccaagcttgcagcgcattcagcattcaccaggaggtcagcttgccctctgacctgcttcctcatggttcctggcagcctactgtcccaaaatcatgtagaacttagactacaattccccttaactacgctgcagacaacaatttaagcattgtgaaacattcactttttcatctgagatattctttcaggttctgcatgtcagtgaaactactgatgccagctgatctgaagggccctgcaaggcatcaactcaccaaagaatgccgttctgacatcgtgataacttcatacctcttattgccatcaaactacaccaactttccagccccttgctatccaggatccactggaaaccctcagtactccttggggagatgaatttgaggatctcctcccagcttctcattcagccaccctgtgatcattaaactttctgctgcaaaccctgctgtctcagaatattggtaagctactgtgcagcaggcataggaacctgatggtcctgtaacaaatttatgtcaaaattataaagggaagtgaaaatggaggctggtcagggttgagctgggtgttttaatggaatcctgggagtgaacgaagacttggtaaatgtgttgggggttattgagagggtggaggaggaatctttccaacattgcactgagggtcccttggttttcatacttgtgaccaagaatgagtctttcaaaaaaatttatgtaattctcctcatttttcctttcaaaacctttgtcttcctttacctccccgaataatctcacatctattcccatggctttgctcatttcataataaaaatccttttttttttttcctgtggagtctctttctctgttaagtagaccatatattttgttgccacacaagatgagtagcctggttttatggagagaaagggacaaaagaatcccaatcctcaacagctaggggtgatatgaaggtcaggattattctttgtcatatctgcacctgcatattgccagtgaaaacctgcaggtcacattaggtagacttccaaattgatcatctgtggaaggtcttatgattggcttacatcctgtccctgagtaaagaatctgatcttgacttcatgagtgcctgagactcttcaagtactgatgaaggcttcacccagtgacagtgagaaggacactgatttgattctgatcgtgaagttttgctggttgtcttgcaaggaaaatatttttgcctgtcatgttgtcatctaaagtcaatgattgtaacctctgtattgtcccttccaatggaaaaaacaaaaacaaaaaagctcaactctattagagccttgccaggataaaacaaaagaaaattaaaaaaaaaacaactgataggaggagtcccatccccttctttcaacctttcttataaaagcattccaacttgcaacaaaagacaaaattgacaaatgggatctaattaaactaaagagcttctgcacagcaaaagaaactaccatcagagtgaacaggcaacctacaaaatgggagaaaattttcacaacctactcatctgacaaagggctaatatccagaatctacaatgaactcaaacaaatttacaagaaaaaaacaaacaaccccatcaaaaagtgggcaaaggacatgaacagacacttcttaaaagaagacatttatgcagccaaaaaacacatgaaaaaatgctcatcatcactggccatcagagaaatgcaaatcaaaaccacaatgagataccatctcacaccagttagaatggcaatcattaaaaagtcaggaaacaacaggtgctgaagaggatgtggagaaataggaacacttttacactgttggtgggactgtaaactagttcaaccattgtggaagtcagtgtggcgattcctcagggatctagaactggaaataccatttgacccagccatcccattactgggtatatacccaaaggactataaatcatgctgctataaagacacatgcacatgtatgtttattgcggcattattgacaataggaaagacttggaaccaacccaaatgtccaacaatgatagactggattaagaaaatgtggcacatatacaccatggaatactatgcagccataaaaaatgatgagttcatgtcctttgtagggacatggatgaaattggaaaacatcattctcagtaaactaaataacaaataaacaaaactaaactaaactaacaaataaataaactaaataaacaaaataagaaattattttggagacagttgataaaaaccatacatcctttttactgttaagtcataaagaggtgtcaaaattaaaaggaaaaattacagggtaagacttaggacaactactaggggtgtcaagggaagtgaaaatgggactaggcacagggcaatatgaattaatgaacatgggaaggacaaagatggggagaacagtaagcatgtgctgaagatactaagggagaggatctggtgaaaaatttgttgttagacaagctcctaggtaaagaaacaatgggataagatttctcaaccccactatgtgcttaagagtcatcctggccattggtgctgtctctgtcatcctctccttcctcagcctctttttcatcatccttgatcaactccagctggtcatccccctgatcttcattaacatcatcatccagtgggtccccctcctcagcagagtcttctgcacccccctcagactccatcttcacatgagtctcatctttcttcatggagctactgctctgctcctcttctgacttagcatttttcacctctacctcttgtttgctctgttccttttcaattttttccaggttttccaggagagaatccactttctgttttatctgggtcaactcctgcttaatggcctgaaggtcatcacctttcaactttccagacttggaagatccccgctttccactcttagaattgaagccacttttgccccttcgtgaggtgtttcctgatagacgttgacgtttcgagggcactacagccagagcaatgggaggaggaggaggtacacgtgctgggaaactgtacattccatcataataatcccgttgaaagccatagtccaagtcaaaagaggagccgtacatctccgctgctgatcgtttcacacctgcgtttcctcggttcacttttggctctgcagccaggttaatatctacaacctggctagcaatcattctgccatcctctcctgctacagcagcccgggcatttttctccttatcatattgaacgaaggcaaagcccttatgaacagagcagcccgcaattttgccatacttggaaaagatcgcctccacatccgatttcttgacaacaagagtgttgagattcccaatgaacacacgggagttcatggagtgaggatccatcttgttggtaacgttgctggccattgtgttggatgataaggtttctcaaaaagccaaaaacaggaggcgggagggagaagagattcgattctaagtctcctactgccgggttctacggggagaaactgactgcggctcgaggccagaaatgcagccaaaccagctcagtcttcgtctcttcacaaaatggctcccaacaagaattctgaaatgatgtaaagaaaagcacaacaacatttttgaaataaagacaaaattgcatttagaaaaaaaatcaaagcttcaaagtgttcatatgaaaaaaagaaaaaaagacaggatatagttctgtgccgtcgtaggctgcactgtcaccgttctagaccggctgactgtaggtcagatgggagtgtccttccagaaattagtgacttaccagatctggttgtagtttagacctctggttgtagttgtagctcagacctcaggaagagccaagcaggaactccaggcttgaagactttgagtctgtcctgtgggtctttagaagcttttattgacctttctaatcacaactcccacccacgcccctccacatatccgctgctagcttccaatcaaaaagcgatatctgattgcatttctgaagctccactcagttaatcctgattgggtttttggctgtccgaagactaatggattgaaccaggtatccattcatatcacatatgcatattcatttcatgaattaagaaattgacagcgttagggatagagtggaagtcaagaattcattcactcaaggccagatgaggtggctcacacctgtaatcccagcactttaggaggccaaggtaggtggatcacctgatgtcaggagttcaagacccgcctggcccacatggtgaaaccctgtctctacaaaaatagaaaagttagccaggcacgatggtggctgcctgtagtccagctactcatgtggctgaggtgggagaatcccttgaaccctggaggctgagtttgcagtgagccaagattacaccattgccctcctgactgggtgacggagggagattttgtcaaaaaaaaaatgcattcattcatgaaatccacaaacactgatggaattttactgctatgtcgccttcaggtcctgagtgtgaggcagggaaggggttgatctgttccggacattagacagaaaaataaaacctgaaagtagtgttgtggggagatctttggccacatcaaaattataaaaatgctttctagttaaaacaactttataaaaacggagtcatccctacaaaataagaataaagatctccatgtatggaatggtcttgtgggttttatatcacctaaggtagcagtttcttcactcgtgctggtggaagagaggtgccactcagggcgtgagtggtctcagtgcttaggttaaggcttctttggaagaaattgaaacgatacctataaactttataaatttaatcagtgaagaagggagggggagaaacaaaaataaaccaagcttgcagcgcattcagcattcaccatgaggtcagcttgctctctgaccttcttcctcatggttgctggcagcctactgtccccaaatcatttagaccttagattacagttccccttaactgccctgcagacaacaatttaagccttgtaaaacattaactttttcatttgagatattcttacgttctgcatgtcagtgaaagtactgatgccagctgatctgaagggccctacaaggcaccaacgcaccaaagaatgcagttttgacatcctgatgacttcatccctcttaactctatatcaactttccagccccttgctatccaggatccactggaaaccctcagtggatctcctccttggggagatgaatttgaggatctcctcctagcttctcatttagccaccctgtgatcattaaactctctgctgcaaactctgctgtctcaaaatattggtaagctactgtgcagcaggcataggaatctgatggtcctgtaataaaatcatgtcaaaattgcaaaaggaagtgagggtagaggatgggcttggttgagcttggtgttttaatgggatcctgggagtgaaccaagacttggtaaacatgttgggggttactgagggggtggaggaggaatctatccaatatttcactgatgcccctttggttttgattattaggaccaaggatgagcctttcaaaacaatttatataatcctccttatttttcctttcaaaaccttcatcttctatttttctcccaaaataatctcacatccattcccaatgctttgctcatttcaggataaacatcttttttttttttttcttacacagtctccttctctgttaagtagaccatatattttgttgccacaaaatgtcatttggactgcttcaaacacaggaattttctgaatttcatgtgaaacccctcctcagaaatattttccttactccaggagatttgctgatatatcaggttggggtgtaaactggatatggcagccctggtaccaccaactctgtaccaaagtctacattgatctggatctcagcttctccattttttatttaagggtattatagaaaataatttaccagagagttatttgaagttccatcaatatggagccatcagaaatgttctctatccaggttcggtggctcgtgcctgtaatcctatcactttgggaggccaaggccggaggataacctgaggttgggtgttggagaccagcctgaccaacacagagaaaccatgtctctactaaaaatacaaaattagctggctgtagtggcacatgcctgtaatccctgctacttgggaggctgagacagtagaatcacttgaacccgggaggtggaggttgcagtgggctgagattgtgccattgcactccagcctgagccacaagagtctgggacaccacctagattagacccagttacactaatgtttcctatgcatagagataagttaccagtaatgaaatcaataatagtcataggccacccatttgcatctatagcttcttctcagtgccgagtcatttaatcataaatattacccaaccgtgtgtgagagcaggttctactattagttgtgatccttcctattcatctaaatgactccataggcagcaattgctttggttagtgatagtggctaaattttgaagaggagaccttagaaagtgtttgctttgactggtgaaagtacgtaacaaaataaaatgtaggcttgatcattttgtgttagtacaaaacaaaaccaagtctcagtcaatggaaggagatagaatggagttttgttccattttcttaaaacagctgtctaccatgtgatgatgtctgcttgtaagaaaggcttttttccttggttatccttaattttaagtcacctggtatggtctcatccaatgctgctcatgggcagatttcccttagggccattttaaaagacacaatctccaaatggtagggcatgaaggtccaatcatcattaaaagcctccttcacctactggaaatagtctttgaaaggtctcgtggtactgagtcatattgttactgaatgatgagctcactctcctaagtgcatagaacccaatactacaccaccatggtttgagaaaagcaaaaaaggctgggcacggtggctcatgcctataataccagcactttaggaggccgagggagtcagatcacaaggtcaggggtttgagaccgcctggacaacatgggaaaaccctgtctctactaaaaatacacaaattagctgggtgtggtgatccatgcctgtaatcccagctactctggaggctgagtcagaagaatggcatgatcctgggaggcagaggttgcagtgagctgagattgcacctctgcagtccagcctgggtgacagggcaagactccattttgggaaaaaataaaaaattattaggagttaactgggccgggcacaatggctcatgcctgtaatcccagcactttaggaggccgaggcgggcagatcacaaggtcaggagttccagaccaggatgaccaatatggtgaaactccctctctactaaaaatacaaaaattagtcaggcatcgtggtgcacgcctgtaatcccatctactgtggaggctgaggcaggaatcacttgaacccggaaggccaagtttgcagtgagctgagatcacgcaactgcactccagcctgggcaacagagcaagactctgtctcaaagaaaaaaataaaaataaaaataaaaataaaaaatagttaactgacagggagacaggagacaagttccaagcctgtctccccaatctggggatagtggagcaagctcacatggcctttccaactggtttcaggtgatgccaattcaaacagtcagccaggctgtgttaacagttaagaggttaaacctttttcccatcggacatgcctgagcaatttaggctttgcaacttaagcaatggttaatctgttggagttgaacccctggttacacagtcagagctaaaatgtgcaggggatacatgaggttctattatcaaaggcataggttctccagtaaatactttatgatcggtgcttctgattgtagttggtgaaaaaaaataccttatgatgggtctggctgtattttcccataggggtggtaaaaattatattaaagtaagccagtcttactgggcgtggtggctcacacctgtaatctcagcactttgggaggctgaggctggcggaacacttgaagccaggagttgaccagcctgggcaacatggtgaaaccccattatctactaaaaatacaaaaattagctgggtgtggtggcatgcctgtaatcccagctacttgggaggctgaggcatgagaattacttgaacccaggaggcagaggttgcagtgagccgagatagcaccactgtactccagcttgggcatcagagactctgtgtcaagtttctccagaggtgcaccagaaaggaaacacattttataatcatttattcactatgactatggcatcagcctttctaaaaaggtaagctacaacccatcctgaaaatggacacacaatcacaaaaattgtagcctttttacatggctcactgtcatcattggtccatgacattcccttttcttgccgctatatgtgtgtatgtctacatattcatatctatatctacacctattttttattaccatgattcacttccactcccctttccatagatagccactctactctttgacatagccttgaatttgcatgtgacctcttagaaaataagtatatagaaagtatatggaatatatacttgaaatttgtatgtgtatttatattaatccacatatatgctatagtgtagggtgctacagaagagggcctgacaattaattgtccagtcctagacactttggagagtgaatggacatgctgttataattaattatttttttttggagatggagtctcactccgtcgccaggctggagagcaatagttccatcttggttcactgcaaactctgcctcctggattcaagtgattctcctgcctcagcctaccgagtacctgggattacaggtgtccaccaccatgcccagctattttttgtattttaatagagagatagttttgccactttggtgaggctggtctcgaactcctgacctcaggtgatccgcccacctcacctcaggtgatccgcccacctcagcctcccaaagtgctgggattacagacgtgagccactccaccgggccttgttataattaagattttcagaacaacaggggtgtatgaaggcttataatcacctttaccatagaccttggtctctcacctaagtttgtaactaatatatttttcaaatataataacaataaaaatatccttgcttgccctatgtcaaatccagctcgaagtacttaaatagattaacttataacactctgtgaagtcaatattgctattatcccattttatatgtgaatgagctaaggcacagagaggttaagtaagttgggtaagaccacacagccattggccactgagccagttttttttttctgggatggagtctcgtgctgtcgcccaggctggagtgcagtggcgcgatctcggctcactgcaagctctgcctcccgggttcactccattctcctgcctcagcctcccgagtagctgggactacaggtgcctgccaccatgtctggctaatttttgtatttttagtagagatggggattcaccgtgttagccaggatggtactgagccagttttgaacctaaattaaacagtctggatctgctggatctggagtctttactactaaccaaaatacctacgtgccttcaaatcctaagttgctgagggtcttaccttgtttcatatctcactaggaagggagctaatgtttatccattacatctgatgtttaatgcaagttttcaacatacaacatctcattttccaaaatatgctatgataaatttaatttgatttttcttcaattcctttctgcattttgtaggaaccttgcttttccccctttagtttgtcagtatgctgaattacacttagatttttctgtgattggctggcattcctggaatggccattatatattactatattgttttctttctttcttttttttttttttttgagctggagtttcactcttgttgcccaagccgaagtgcaatggcacgatctcgactcactgcaacctccaccttcttggttcaagcgaatctccagcctcagcctcctgagttgctgggattacaggcatgcgccaccacacctggctaattttgtatttttagtagggatggggtttctccatgttggtcaggctggtctcgaactccagacctgaggtgatccacctgcctcagcctctcaaagtgctgggattgcaggcatgagccacggagcctggcctgtctatcactttctgatgcagtgttgcatttagttagctggtaatttattaagtacttttttctggctgaccgtggtggctcatgcctgtttgccaatcatttgctgccagaacatgggcagatttttctctggccaagtctcaggtttatcaggttagaaatggggaaaatagcaacgtgccttagattctccatgaggaagagctgaggtccgggatgatcggtaccagccatctgttgtgcctcgtggatgctcagtgaacacagattctcacaaccattattggtgctgagctcaccctcagcctcaggtttacaaagtggggcgtgggaagtagaagcctcactgggctcaggtgatcctcccacctcaacttcttgggcagcttggcctacaggtgcacactgcctccccctggctaatatcttgtatttgtattagagacagggtttcatcacattgcccatactcctcacaaattcctgagctctagcactctgcctttcttggcttcccaaagggctgggattggaggcctgagcttgcttgctttcccttcccaagtgtggccccgatcttctctctggcctctgctccagctcacattctcagattccatctttgcaagctggttttctgagaggagcccatcatttttgtgggtaaacaccctttaccttctagtagggccaagactatacctgccccctgtgttctcaaagccaatgttatggttaagagtctgacctatctcttttgatgattctcctttgaatttctgaactcaatctagggtgtgtgagatggctgatgcctgtaatcctagcactttgggaggctgaggtggggagatcacttgaggtcaagagttcgagaccagccgggccaacatggtgaaaccccatctcaactaaaaatacaaaaattagtggggcatgttggagcgcacccataattcccagctactcgggaggcaaggtgagaaaatcgcttgaacccagaaagttgaggttgcagtgagctgaaatcatgccactgcactccagcctgggtgacagatggtggcccagtctgaaaatcaaagaatcaataaataaactcaatcttgacaaaggactttcagtcctgacatctagatgcccacaagataaccaccatgttttacattgtcttgtttcctttgcaggttcccattagaaaacctagtctcattccactcagtccgcacctcacttggtcattttgtcctgatttccttcagtgaagccttgacttagtcttgagatagatcacaccctcagtggttcctttcttctacctgaatgtgcatatgatctgctatgttagatagcataaaacacaggtaaccattcgatatacacagctttttattctgttttcttgggaatgacatcactatcttcttcaggctgttgtagctctgaaacattttgacaattttgatgtggccaaacatcctccaataaggacaccttaaggtttttttttttttttttgtctgatatcaggaacagattaatcccttccctgtatcactatgaaagtcatctattagccaaacttcatcagtatttggggaataaatgaatgaatgagttttggactttcaccctattatttattcttttacttccataaatgtgtatctaattcgatcaattagtcagaagaaagctgaaaactcaatcaggattaactgggtgtgactgcaagatctaatcaggtatcactttctgattggaagctggtgattgagaagggaagggtggggttagaaaggtctataaaagctcctgagggtacccagaagagacccacagcactcacacctgaagctactggttggttccctgagaggtcccagaactctgcaaagtgagtccagcgctggtaagtcaccaccttcttagggtcatgcccatctgatcagcagccagccagtcagggacggtgacacacatcccaaagtggcacacaatatttttctgtctgttttgtgagatgaacagatttaggctttcatttttcctctaaatgtagttttgtcttcatccatcagattgtgatttgtgcttggtttttgtcattttaaaattcttatggaagcaggttttttaaaaatatattaaaactttacagtgacatgaatttttatttcttgacatttgaagttatttgtttttgtgcctttcaattacagttcatagacttggtgttattgtgatcctccaagtatgctttcattttcataaaatccttaaaggtatcccacacaccaatctcaagagtgcagttttgctcagattgtgggatttatttttgaccctaggatcgatccatcaaaaagtgggtaattgtgagtatgtggaagtgatgtctataggaaccttcatcttagagttacagtgctctagaatagcatggtagcacttttacagtttctggttgattttttttttgagatggagtttccctattgttgcccaggctggagtgccatggtgtggtttggctcactgaaatttctgcctcctagttacatgtgattctcctgcttcagcctcctgagtagcttggattacaggcactcaccaccatgcccagctaatttttgtatttttagtagacacagggttttgccatgttggccatgctggcctcaaactcctgacctcaggagatctgcccccctcagactcccaaagtgctgggattacaggagtaagccagcatgcccagctacagttagcatttctatacataccttccaaatgctgtggaataccatcacaccacttttacagttccagtgaattattttgtttttttctgcgatgtactctgagtgcgtcacccagactggagtgcagggccctgagctgggctccctggaaactctgtctctgggcttcaagtgattctccttcctctgcctccagagtagctaggattacagtcatgcatgaccacacctggctaatatttaaattaattaatttatcaatttgtttatttttgagtcagagtccaacgctgtcacccaggctggagtgcagtggtgtgatgtcggctcactgaaacctctgccttctggagtcaaatgattcttaacttttgtatatttagtagagacatggtttcattatgtaggcccaggctgttctcgaactcctgacctcaagtgatctgcctgccttggtgtccagcagtgttgggattacagacataagccacagcacctggtccatttctggtagaaaattttcaaaataaaaaataatggcatcgattttagggagtccctttagtgttcccccagcatgttcatggtgtgaactgagaatggaggctgtctgggcccacgggacactctcattctcaatgctttagggtggtaagtgacaagaaatttttcctcaaagaggtagagcttggctttcaggatcctcagtggcactgtccagtggttctgggattcagtggagcgaaggatgaaaattaatgggtcaatggtctctttgacccctccctccttggtgtttggaagatattcttcctggtaccagcagaagcagaagtatagatttgaggccaacaagcacagtggaattggggtaaagtggtaatttttctacctctaccagagcaatgatattggtcctaggagaagatgaggtgattgtgtttgccctgagagtgatacattctccctggatttgtcttctagagatttttcttgcagatccatcaggatgagcatccaggccccaccgagactactggagctggcggggcagagcctgctgagagaccaggccttgtccatctctgccatggaggagctgcccagggtgctctatctcccactcttcagggaggccttcagcaggagacacttccagactctgacggtgatggtgcaggcctggcctttcacctgcctccctctggtatcgctgatgaagacgcttcatctggagccattgaaagcattgctggaagggcttcatatgctgcttacacagaaggatcgccccaggtgaggtgacccaggagggctagtagatagggctcaggtgtccagggaaagaacagcagggtcaggcagagaagtaacccaagtgcggcccagagtcttctgatggtgttggcgaggaagctcagggaggctttggccattgtccagatcctcagagaaaggactgctcaccatacagggtccactgtgggaacagaaaccggcctttactcagtggaaggtaaagggaatagaagtggggaccactcagaatccaaagggaaaagggattgagaaaagacaaagagaacagggagcactgaggacaggagcagctgatttatgggatgagaatgaaagcaaaggtcagggatgagtccctctaaattctgagcctctcccttactttacccacaggaggtggaaacttcaagtgctggatttgcgggatgttgatgagaatttctgggccagatggcctggagcctgggccctgtcctgcttcccagaggccatgagtaagaggcagacagcagaggactgtccaaggacgggagagcaccagcccttaaaggtgttcatagacatctgcctcaaggaaataccccaggatgaatgcctgagatacctcttccagtgggtttaccaaaggagaggtttagtacacctgtgctgtagtaagctggtcaattatctaacgccaattaaatatctcagaaagtcattgaaaataatatacattaatagtattggggagctggaaattcacaacacgtgctggccacatctgataagaaagctttattgttacctgaaggagatgaagactctttgcaaactcgttttctccaggtgccatcattacacgtcagataatgaactcgagggatggttagtcaccagattcacctctgtgttcctcaggctggaacacctccagttgcttaaaataaaattgatcaccttcttcagtgggcacctggaacagctgatcaggtgagaaaggattgtgcactttgtatgcagaccacagcacagacttgttctgttacagcaaacattagaaggcgtgtactgtgtgccagccagtggcaacgtcacagtgaagggaacaccagaatgtcaacacattgtcccattcagtgttccatgtcctggagtggctatcacaggatcgctccaataagggcagaggggtcacctggggtagaagctagagagggacatcatgtacaagctagtcagtgggggtttcagctctattgggggtgcacgtgtgaatttcctgttacaaagtgtgtttcaagttgatatgatgtcaaagagataatagaggagggtatgaaaggagggaaagcgcatcaaacctgtccatttcacaatagaacgtctgtcctcaccggcttagtgatcacgaatgatcctgtctttaattccctgtctgcaaaacgttgttttgaactccaggaaaggtaattgacatgggaaatgcgtgcttccgggatggaggtgagggagtaggcgtgagagtggtaaaaagtgacagttggtttgcagatgcaggcatgtcagggagcccctgccgacatgtagccctagctgatgtccctagaccttgctgagttgagttctttgttcacatctcccacggggtacctgtagcccagagatgaagttttctgctaaaagatgaaaaacaaaaaggctttagagattttatggccttgacccaatcacacaagcaatggtgaaagggctgaggctaaaatgggacagcccctgaacgatcagggtcctcatcatgcagcaacttccatgaggaccatcatcagatggtgggaacaaacttgtgtttggttgaagcaggtattttccttgaggttattccccactaccttcatctaactggtaccattgcccagaactaacttcttgatctccacaggtgcctccagaaccccttggagaacttggaattaacttgtggcaacctattagaagaggacttgaagtgtctctcccagttcccaagcctcggttacctaaagcatctgaatctcagctacgtgctgctgttccgcatcagtcttgaacccctaggagctctgctagagaaaattgctgcctctctcgagaccctcgtgttagagggctgtcagatccactactcccaactcagtgccatcctgcctggcctgagctgctgctcccagctcaccaccttctactttggcagcaattgcatgtctattgacgccctgaaggacctgctgcgccacaccagtgggctgagcaagttaagcctggagacgtatcctgcccctgaggagagtttgaattccttggttcgtgtcaattgggagatcttcaccccacttcgggctgagctgatgtgtacactgagggaattcaggcagcccaagaggatcttcattggccccaccccctgcccttcctgtggctcatcaccgtctgaggaactggagctccatctttgctgctagggaaggcgtgcccagtggggtagagaaatccaaagttctcttccaggcacttggacactaaaatctactatgtaggtgcaaactatttttctcttttcttatttatttcattttttaataattccaaaatttttattaaagacaatttgagacagggtttctctgtgttgctctgggatcctcctgcctcagcttcctaaagtgctgggattactggcatgagtgactgtgtccaggccacatgcaacttaaaggaagcacaggcaagtgctcagtgtgagagagaaaacataacagcagggggcaaggctggaggaaaatgttgaggtgacatcaatgagaacttcagggacccgtgtcctacagagtcggaaagagaagctaaagttctacagtgatgagaatgttatccctgcaaggatggttaccaaggaatatcagaaataaagagcacctgaatgaaaacttttaacgtgttgtagcaatttatccaccagaaatatctagttattgagttactgatggaaaaataatgaaatactactttgtctgtgattgagtttcagctgtagaacatcaaagcaaccaaataaaatttgatcattttaagtatttcccacccattcttgttctttgttttgttttggagacaaaatctcagtttgtcatttaggctggagtgcagtggtgcaatctgggctcattgcaatcctttccttcagggctcaagtgattcttgtgcctcaaccactcaattagctgggacggcaggcacgtttcaccaagactggctgatttttgtatttttaatggagatgaggtttttccatgttgatcagcctggtctcaagatcctggctttgagtgatccactgaccttggcctcccaaagcgctgggaaaacaggcatacagatgatttccacccattctttacttctcttcagtcatcagtttttttcttacttttttgcccaaggggagcagctcggtcaggcgcgaagggacgggcagagaggggccccaaggagaagataggaatggggtggtgccacgttcgcacaagatgtgcggatgccaggcccagaaggcatagctggggccatccatcagggggccagggtgagaagcagaaatggcacctgtttcaaggacctggccagctatctggccactgtgcccatcctgctaacagtgtcaagctcccaggtcttgaagggagggtctatgcggatccaccccatgctgtgtttccgagatccgccccccataggagtgaccagcccgattgctgggcctgggaactatgaaccactcctggaggcaccccccttgacagggtcatgagccaggcctgtgctccatttccctgaggcagcctactgtgccacccacaccctctcattgcaaaatggaaccttgtcccaggtctggagtctccaccacagcctctacttcactgctcactgcctgccgttagcctgcaagctcctggatgatagtgcagttggggctggttaaaccacacccaggagcattgggtttgtttgtgtggggttggccagagctgctgtgtacctgcttctcaactgtcacttctgcagggaaacacagagagagggcacagccaaggctgcgtacacttcagagctgatgggagcctgggacaagagggagtcctggtcctcctgagttggcagggcagtagctccaaagacgcaactgaagttgtccaggtcacagttaccaaatgaggtcccccagtactctcgagggtccaggagatccccccttctcctgcagcttgggggtgtccgctctcactgcctcatctctcatggcacctgctctaattttggagtgtggttgtggtcaagcccagatgctgtcacagcccaggtgggtctgtgcacactcgggtcagtgctgatgcaccatcccactgctgtcttgaaccctctggactttgggccttgatgagtgtaggagggaggctgaggggtgttgcggactgatcagcactggtctttggatgctccttggtacaagtgacctgggctccatggttggtggtgggaagcagacagaatcctggacaggaaggtgagggtcactggtgaagctccaccttctgatcaaggagggtctgaagcccgtgggctgggccaccagtcctatggaccagagtgggaacatgtgttgccttttctgtgcctgctcatggccacctatgacccaatgagtgcatactttctcctgtctgatgtcaaaaaaaccccagactcagggagaacattaggaagaccagtggcagagaggaactacccactgttgggatgattttcctgtagagacaagcaaccccctccgggtccttttctctgctgagagctgtagagatgatgagatgactttcctgcagagagcagcaacccactccagggccttctctctactgagagcagtggtgatgatggaataacctgccaggagggaggggtcacccaccccagggcctcctctctgctcagagctaaacactcatcaggacgccctggctgcagaaagaagttacccactgtgggtctctaagctgttctattgctcaataaagctcttctttatctcactcaccctccacttgtctgcatatttcactcttcctggtcacaggacaaaaacttgagacccgcctaatggtggggtaaaagagcaataacacaaataaagctgaaacatgccccttgctcaccaaattgtaggtgaagagaaaaagagaagagcaactactcttccaggagcccagatgtgggagcttcctgagccagggctgtgactcccttttgggggttctgcagttcctggcatttccaagctttcagtgttggtgtcactgtgtattccagtgacaaccatggaagctgtttgtgctgtgcctgattcatttgcagccttgcagaaatctggcacacatgctggcatctggagctgcccatcccactgctgcagcagcagcagccggtgaccgtccaaagtggccagaccccctgctcactcacacacccctcaccactccagccctgacccgcccttaataggcatgtgctccaggcctgaaacatgagccaagcatagtctaccaggctgcatgggcagaacgaacccagtgaaccccatcaaaactctggcaaaggtgcccccagccacagaggtttctggccagaagagtcacattccaagtattccagaagagaaaattacttaaacacaaagaaagacaataagaaaaggatggaagagagaagtctctaaacaaccaaaaaacaaggaatgaaatgggagcactaagcttttatcaataaaaacaatgaatataatttatctgaattctgcaagtgaaaggcaaagggtctttgaatgagtaaaaaaatacgaccctactatatgctgttttccagaaactcaattcacctataagcatacatgtagatggaaagtgatggggtagaataagatattccatgcaactggaaaccaaaaacagcaagagtagctgtacttatatcaggtaaaatagatgccaaatctcacaatgcactcaggtaaaacagaatacaaatctgagcttgtaaaataatagactacgcttacacaaactatgcctagaaagaacatacatcaaaataatagaagccaaaaataaatccacatgcaacatcatattgaatgaagaaacgttgaaagtattcctgctaggaactacaagcagacaaaaatgctcactttatccacttgcaatcaacataggactgaaaatgtttgtcagagcaatctggtaagcaaaaggaataaagtataattaaattggaaagaaggaagtgaaactacctgtgtttgccaatgatgtgatcatatgtgcttagaaaaccggaaagattccaccaagactcgtagatgtgataagtgaattcacttaaatctcaggtacaaaattaatatgtacaaatcagtaccactgtttgatatcaacaacaagcaagctgagaatcaattcaagaactccatcccttcacaatagttgcaaaacaacaacaaaaacagtgacaataacaaaaacaacctaggaatacacttaaccattaggtaaaggatctctatgagatgaactacaagacactgctgaaaaaaatcatagacaacaaaaaagtagaaaaatatcccatgctcatggattgacagacacaatgttgtgaaaatcaccacactgcccaaagcaatctaaaacctgcaaacatcaaacatcaatctaaaaacgtcagtctaaaaatttcatacaccaaaatacaaacaccattttcacaagattaaaaaaagaatcctaagattcatatggagatgaaaaagaggctgaagagccaaagcaatccgaagcaaaatgaacaaatatggaggcatcacattacctgacttcaatttatacagtaaggcaatagtaagcaaaactgcgtggtaccagtatgaaggtcgagacatagaccaatggaatggaatagagaaccccggaataaagccacatacttacaacccagcggtaggactgctgcttctcagtttgtgctgagtgatgccccttggggatatggggccaaagttactggatttttcccccaagaaaaccagagagtgaattgtgatatcctgtgtgatttttagactgactattgccatagtgcttaggtcgtctccaggtgcccagagactcaatcaccaaccagtgtccacattcttgtcaccgctgcaagaaagagtttaggaagtaggcagaatgaagcaaaaggcaagaagtgtctattgcaaagcaaaggaacacactcaagagagggcttattcaggagagcgagtcaggtacaagagagtttgggtttctaattttataggatctgtaaggagaggttgaaataatcattaggattttaagaaaaaatggtgaagttttcttagaactgaggtgtcatttatttatttatttatttatttatttatgttttgagatggagtttcgctcttgttgcccaggctggagtgcaatggcgcgatcttggctcactgcaatctccgcctcccgtgttcaagcaatactcctgcctcagcctctggagtagctggggttacagacatgcaccaccacactcggctaattttgtatttttaggagagacgagatttctccatgttggtcagggtggtctcaatctcccgacaccaggttatccgcctgcctcagtttcccaaaatgttgggattacaggcatgagccactgcacgtggctaggtgttaactatttttatactaaatatgggcattctcagaaccgtcctggcgctggtgtgtgacttactgtcataataggtgtataattaggcctggggtagggcaagggtcaaacccagtgccatgtctgaccaattcagtgttagccagcttagccccttccagcttgtttggatcttatgggtcaaggcttattcttattcttgcagctaattttacaggctcttttcttgctgctatatgaaatcactgcttgatattttcatgcttctcctgtgaccagccagctttcctattttatgggtatttcttttcttctcccttcccttcccttcccttcccttcacctcctctcccctcccctcccctccactgtcttgtcttttctttctttctttctttctttctttctttctttctttctttctttctttctttctttctttctttctttctttcttttttctttctttctttcttactttctctttctttctttccttccttccttccttccatctttctttctttctctctttctttcttctttctttctttctttctttctttctttctttctttctttcttactttctctttctttctttccttccttccttccttccttccatctttctttctttctctctttctttctttctttctttctttctttctttctttctttctttctttctttctttctttctttctttctttctttctttctttccactttaagttctgggatacatgtgcagaacgtgcagttttgttacatacgtatacacatgccatggtggtttgctgcacccatcaacccgtcatctacattaggtatttcccctaatgctacccctctcctagccctccacaccccgagaggccctgatgtgtaatgttcccctacctgtgaccatgagttctcattgttcaactcccacttatgtggtgttttggtttactgttcctgtgttagtttgctgagaatgatggtttctagcttcatccatgtccctgcaaaggaaatgaacttattttttatgactgcatagtattccatgatgtatatgtgccacatttgctttatccagtctatcattgatgggcatttgggttggttccaagtctttgctgttgtgaatagtgctgcaataaacatacttgtgcatgtgtctttatagtagaaggatttataatcctttggatatatacccagtaatgggattgctggatcaaatggtatttctggttctagatccttgaggaattgccacactgtcttccacaatggttgaactaatttacactcccaccaacagtgtcaaagcattcctatttctccacatcctttccagcatctgttgtttcctgactttttaatgatcaccattctaactggcatgagatggtatctcactgtggttttgatttgcattagagaaatgcaaatcaaatgaccagtggtgatgaacattttttcatatgtttgttggctggataaatggtttttttggagagttgtctgttagtatccttcacccactttttgacagggttgtttgtttttttcttgtaaatttgcttaagttccttgtagattctggatattagccatttgtctgatggatagattgcaaaaaattttcccattctataggttgcctgttgactctgatgatagtttcttttgctgtgcaaaagctctttattttaattagatcccatttgtcaattttggcttttgttgccattggttttagtgttttagccatgaagtctttgcccatgcctatgtcctgaatggtatcacctaggtattcttctaggatttttaatggctttaggccttacatttaagtctttaatccatcttgagttaatttttgtataaggtgaaaggaaggggttcagtttcagttttctgcatatggctagccagttttcccaacaccgtttattaaatagggaatcctttccccattggctgtttttgtcaggtttgtcaaggatcagatggttgtagatgtgtggcattatttctgagtcctcttttctgttccattggtctacatatctgttttgataactgtaccatgttgttctggttactgtagccttgtcgtatagtttgaagtcaggtagcgtgatgcctccagctttgttctttttgcttaggattgtgttgtgtatacaggttcttttttgcttccatatgaagttttaagtagttttttctaattctgtgaagaaactccattacagcttgatggggatagcattggatctataaatcactttgggcagtatggccattttcatgatattgattcttcagacccatgagcatggaatgtttttccatgtgttagtgtcctctcttatttccttaagcagtggtttgtagttctccttgaagaggtccttcacaccccttgtaagttgtattcctatgtattttattttcttttagcaattgtgaatgggagttcactcatgattggctctccgtttgtctattgttgatgtataggaatgattttgatttttgcacattgattttgtatcctgagactttgttgaagttgcttatcagctttaggagattttgggctgagacgatggggttttctaaatatacaatcatatcatctgcaaacagagacaatttgacttcctctcttcctatttgaatactctttatttctttctcttgcctgattgccctggccagaacttccaatactatgttgaataggagtggtgagagagggcatccatgcattgtgctggttttcaaagggaatgcttctagcttttgcccattcagtatgatattggttgtggttttgtcataaatggctcttattatttttacatacgttccatcaatacctagtttatctagagtttttagcctgaaagggtgttgaattttatcaaaggccttttctgcacatattgaaataatcatgtggtttttgtcattggttctgtttatgtgatggattacgtttattgatttgcgtaagtggaaccagccttgcggatcagggatgaagccgacttgatattggaggataaactttttgatgtgctgctggattcggtttgccagtattttattgaggatttttgcattgatgttaatcagggatattggtctcaaattctctttttttgttgcgtctctgcgaggctttggtgtcaggatgatgctggcctcataaaatgagttagggaggattccctctttttctattaagtggaatagtttcagaaggaatggtaccagctcctccttgtacctctgatagaattcgactgtgaatccatctggtcctggactttttttggttggtaagctattaattattgcctcaatttcagagcctgttattggtctattcagagattcaccttcttcctggtttattctggggagggtgtatgtgttgaggaatttatccatttcttctagattttctagtttatttgcatagagttgtttatagtattctctgatggtagtttgtctttctgtgggatccgtggtgatatgccctttatcattttttattgcatctatttgattcttctatcttttcttctttattagtcttgctagcagtctatcaattttgttgatcttttcaaaaaaccagctaccggattcattgattttttgaaggggtttttgtgtctctatttcctttgggtctgctctgatcttagctatttcttgctttctgctggcttttggatgtgtttgctcttgcttctctagttcttttaattgtgatgttcggttgtcaattttagatctttcctgctttctcttgtgggcatttagtgctataaatttccctctacacactgctttgaatgtgtcccagagattctggtatgttgtgtcttttttctcattggtttcaaagaatgtctttatttctgtcttcatttcgttatgtacccagtagtcattcaggagcaggttgttcaatttccatgtagttgagcggttttgagtgagtttcttttattattattattatgctttaagttttagggtacatgtgaacaacgtgcaggtttgttacatatgtatacgtgtgccatgttggtgtgctgcacacattaactcgtcatttagccttaggtatacctcctaatggtatcctatgcagccataaaaaatgatgagttcatgtcctttgtagggacatagatgaagctgggaaccatcattctcagcaaactatcacaagcacaaaaaaccaaacactgcatgttctcgctcataggtgggaattgaacaatgagaacacatggacacaggaaagggaacatcacacactgagtgagtttcttaatcctgagttctagtttgattgcactgtggtctgagagacagtttgttataatttctgttctcttacatttgctgaggtgtgctttacttccaactatgtggtcaatttttggaataagtgcagtgtggtgctgagaagaatgtatattctgttgattttggattgtgagttctgtagatgtctattaggtccgcttggcacagagctgagttcaattcctgtatatccttgttaactttctgtctcattgatgtgtctaatgttgacagtggggtgttgaagtctcccattattattgtgtgggagtctaagtctctttgtaggtctctaaggacttgctttatgaatctgggtgctcctgtattgggtgcatctatatttaggatagttagctcttcttgttgaatggatccctttaccatgatgtaatggccttctttgtctcttttgatctttgttggtttaaagtctgttttatccgagactaggatggcaactcctgcctttttgtgttttccatttgcttggaagatcttcctccatccctttattttgagcctatgtgtgtctctgcatgtgagatgggtttcctgaatacagcacactgatgggtcttgactctttatgaaatttgccagtctgtgttttttaattggagcatttagcccatttacatttaaggttaatattgttatgtgtgaatttgatcctgtcattatgatgttagctggttattttgctctttagttgatgcagtttcttcctagtatcgatggtccttccaatttggcatgtttttgaagtggctggtaccagttgttcctttccatgtttagtgcttccttcaggagctcttatagggcaggcctggtggtgacaaaatctctcagcatttgcttgtctgtaaaggaatttatttctccttcacttatgaagcttagtttggttgcatatgaaattctgggtcgaaaattcttttcttaagaatgttgaatataggcccccactctcttctagcttgtagagtttctgccgagagctccgctgtcagtctgatgggcttccctttgtgggtaacccgacctttctctctggttgcccttaacattttttccttcatttcaactttggtgaatctgacaattatgtgtcttggagtcgctcttctcaaggagtatctttgtggcattctgtgtatttcctgaatttgaatgtttgcctgccttgctagattggggaagttctgctggataatatcctgaagagtgttttccagcttggttccattctccccatcactttcaggtacacctgtcagacatagacttggtcttttcacatagtcccatatttcttggaggctttgttcatttcctcttattcttttatctctgaacttctcttctcgcttcatttcattcgtttgatcttccttcactgataccctttcttccagttgatggaatcagctactgaggcttgtacatttgtcacgtggttcttgtgccatggttttcagctccatcaggtccttcaaggacttctctgcattggttattttagttagccattcatctaattttttttcaatgtttttgacttctttgccatgggttcgaacttcctcttttagctcagagtagtttgatcatctgaagccttcatctctcaactcatcaaagtccttctccctctagctttgttccattgctggtgaggagctgcgttcctttggaggaggagaggaactctgatttttagagtttcccatttttctgctctgctttttccccatctttgtggttttatctacctttggtctttgatgatgctgatgtacagactgggttttggtgtggatgtcctttctgtttgttagttttccttctaacagtcaggaccctcagctgcaggtctgttggagtttgctggaggtccactccagaagctgtttgcctgggtatcagcagcagaggctgcagaacagtggatattggtgaacaacaaatgttgctgcccgatcattcctgtggaagttttgtctcagaggagtacctggccatgtgaggtgtcagtctgcccctgctggtgggtgcctcccagttaggctacttaggggtcacagacccacttgaggagtcagtctgtccattctcagatctccagctgcgtgctgggagaaccactactctcttcaaagctgtcagacagggacatttaagtctacagaggattctgctgccttttgtttggcaatgccctgcccccagaaatggagtctgcagaggcaggcaggcctccttgagctgcagtgggctccacccagttccagcttcctggctgctttgtttacctactcaagcctcaacaatggcaggcgcccctcccccagccttgctgccgccttgcagtttgatctcagactgctgtgctagcaatgagtgaggctccgtgggcataggaccttttgagccagacacgagatataatctcctggtgtgccatttgctaagactgttggaaaagtgcagtattagggtgggagtgaccggattttacaggtgccatctgtcacccctttctttgactaggaaagggaattccctgactccttgcacttcccaggagaggcaatgcctcacgctgctttggctcatgctcggtgcactgcacccactgtcttacacccactttctgacactccccagtgagaagaacctggtacctcagttggaaatgcagaaatcacccgtcttctgcaccgctcaggctgggagctgtagactggagctgttcctattcggccatcttggctcaaccccctagttaatttttgtgtctttaatagagacagggtttcatcatattggccagagtcgtcttgaactcctgactgaagtgatccacccacctcagtctctgcaagtgctgggattacagatgtgagccactgtgcctggtcaattgctggacgttcatgatacacctggagtatccacagtatcacaagggccatttttttccataatccaatttatttatattattggtagtgagctaatgttgatgtccccaaggtagcaatttagtgactatacccatgataaacgtttccatgcatcacgtggtcaacagcatttgctaccaagtgccacgttccatgctcagcagtgggaacacaggatgatggagacaaagttcctgacctttagcagcaatatcgaacaagtgagattgtcaagaaagaagaaatcattgtaaaacataccatacccctacaattccgtaatcatgctcctggatatttaatgaagtgagtaaacccacacctggatgtttacagcaacttactcataatcgccaaaacttggaagctagcaagttgcccttcggtcagtgactggataagcaaactgatccatccagtcagtgaactattataaagctgtaaaaagacatgaaaaattcctaaatgcacgttattgtacaagtgaaagaaggcaatctgaaaagactcatcctgttagacattccagaaaaagcttttgcatttttctaaggagacagtagaaagcccagtggatgcaaggggttgggagcacaatgggatgaatgggaagaggacagaggaattttagggaaagaaaactactctccatgatgctctaatggtggatacatgtcattatccctttgttaaaatccatagaatgtacaaaaccagcaatgatccctcatgtgaactatggacattgggtgataatgatgtgtccctgtggctcattggttgtgatgaatgctctgtgctggtgtgggtgctgatcctgtgggggtgctgtgtattgaagggggaagaaggtagatgagaactctgcagtttctgcttagtttttctgtgaatctaaaactgctgtaaaggaaaaaataggctgggtgtggtggctcacgtctatagtcatagcattttgggaagccgaggcaggtggatcacctgagatcaggggttccagaccagcctagctaaaatgacaaaaccctgtctctactaaaaactgataataataataatacaaaaattaatcaggtgtggtgttgcatgcctgtaatcccagctactctggaggctgagacaggagcattgctggaatcctggaggcagaagttgcagtgaacagagatcgtacctctgcactccagcacggatgacagaaggagactccatctccaaaataaataaataaataaactcaaggctgggtgcggtggctcatgcctataggaactcactcccagcaatttaggaggccgaggcaggtggatcgcttgagcccagaatttcaagaccagtctgggcaacatggtgaagcctggtcttcactaagaatacaaaaataagtcaggcatgatggtgcatgcctgttgttccagctactagggggactgaggcagggagatcacctgagcctaggaggtcaaggctgcagtaagccgtgatcatgccactgcactccaatctggacaacagagtgagactttgtctccaaataaaataaaataaaataaaataaaataaactcaatattttttaaaactgtaatgtttcctttcaaagctaaaattgtattattctaaatatattttaaagaagaaatgattattgttcagtgtctttaaaattagtttttaaaatctcatttgttttgacatttcaaaccaagttaagtattctttttctcaccctccttgagacggagtcttcctctttcacccaggctggagtgcagtggtgcattcttggctcactgcaacctttgcctcgcaggttcaagcgattctcttgcctcagcctcctgactatctgggattacaggcacctgtcaccacgccaggctaattttttgtatttttcgtagagacggggtttcatcatgttggccaggctggtctggaactcctgacctcgtgatctgcccacctcggcctcccaaagtgccaggaatacaggcatgaaccaccacacctggccattaaccattcttgaaatatcacgttgcattctttaaaagttctaatctttcatatacataaattacaacacaaatatttatactctaatagtattcacattatagtaaattttttttcatgctctgtcgcccaggctggagtgaagtggtgccatctcgtctcattgcaaccctcacctcccgggttcaagtgattgtcctgcctcagcctcctgaatacctgggattacaggcgaatgccaccactcccagcaaattttgtgtatttttagtagagatggggtttcaccatgttggccaggctggtctcaaaatcctgaggctgccttggcctcccaaagtgctgggattagaggtgtgagacaccatgcccggccataataataaatcttattttatctttttttttgagacggagttttgctagggttgcccaggctggagtgcaatggctcagtctgagctcaccacaacctccacctccaggttcaaatgattctcccgcctcagcctatcgagtagctgcaattacagacgtgcgccaccacgcctggctaattttttgtattttaagtagagaagggttttcttcatgttgctcaggctggtctcaaactcccaacctcaggtgatccacctgcctcagcctcccaaagtgctggaattacaggtatgactcactgcacctggctcataatagtacatttttaaaaacaccataaaatataatccttgcaacactcaattataccatctggtcggatctatcagcagatggcacccgagacatacggattggaaattttgatcttattatgaatgaatccagtccagaaatgcccaccctgccccctgctggctcctggggctctgctctttggggcaatcatgatgaaattgtggcagagagtagaagttgagccccattgcatgccctgagttcttgttgcctctctattatcaggaaaaggaggtgagattgaaagatgaaaagtgctgggacttctgctgagaagagaaaaaagaacaagatgtattgatcttactgtatgccagaccccatgccaagccctaaacatgaaccatctcattggatcctaccaaggtcccataagctgttggacatcatcatcctcattttacaggaagctgaggctctaggctaacatccctgacagcaacaccagcccctgagtactcagcaggatccttcacttgggtgcccattatgcagaattcctcagcacagggaaggtcactcatcacccacaggcccttgatcgttatccaccctttgatgctgtcagattccagaacacgctgcactagtctcttccttcatagggagagaggggaggtgttatgagaaaatctctcatcaatctgacctagctcccccaaaagatgtaacttttaaaatgtcagatggaaatatttaaaaagtgttacatgcctgtatagttttagtattttacttaaagggaatgtggctgtctttactggctacaaccagtttaattcaagaagggctgctggtcatcaggagaacaagcaagggttgatgctgcccagagtctccagctaatacacaatatggacatccccttccagggcagcgggaagagagtggctccttgtgcagtgaagctgacatccaccaactaaggcttctggaagcatgtggagactcacagggagtgggcagggtctcagcatctggatagcggtgaaagaccctgagaagaaggtgctttccgtgtggattggctcactgttcttgcccagtaatgttccaggcctttggtgtccacctagtgtgtattaacccactgaacagccacagaaactaacaaggagttaacagacatctaaagaagtgaagaactggaggaggccaagccaagcgtggtggtccacgcctatactccctgcattttgggaggccaaggcaggagaatcacaagctcaggagttccagatcagcctggggaagacagcgaggccttgtctctactaaaaagaagtatccaggtgtggtggctcacacagctgtagtcatagctactcaggaggctgaggtgggtggatcgcttgaaccccggaaattgaggttgcagtgaggtatgattgtgccactgcactgtagcctgagtgacaggagacctttaaaaaacaaacaaacaaaaaagcctgacacagtggctcacacctgtaaccccagcactttggtaggcctacttgcatgaatcacccaaagtcaggagtttgagaccagcctgaccaacatagtgaggaaaccctgtctctactaaacatacacaaattagctgggcatggtggtgcatgcttgtaatcccagctacttgggaggctgaggcagaagaatcatttaaaccccaggtggaggttgcagtcagctcagatggcaccattgcactctaaactccagcctgggcaacaagagtgaaactctgtctccaataaaagaatgggaggaaactgattacaataaccaaatttcatttaaatgccttgattttcttgggctgcatcttattgattggacaactcagtcagtgccttttgttttttccatcaataactgaagattcctgaggcttaaactggaaaacaggttacttaataatagagggcaccagacagattctgctcagttttcctttatttctgattgtttctttacaaccatccatgcaagagtaactccctcatgtattctcaagcctgaattccactctagacattcagattcccattttcgactctacaggacacaggtccccaaagtcccatcgaatccatggcaacatttcccccaagtccggcccctgcttgatcagctttcctttcccactttcagagcctatgtgtgaaatgatgggttctgtgctccctttaggatgtacctaagacctaggttttagtttccaagtgtccagaagaaagcgtttgacatacccatccaaataggcaggcattcaacagcagtattgatctgcctccaggtcataaaatgacctgttgccacagtcagggcagtagtcagtacagaacaagatcctcttggggtgccttaagtccctcactctgttcatcagctcagccctaatttgagcaaatctgctccagcagagagtaccatcagcaccataactctcccggggggcaggatacagctccacgcataagtttttgagtatgattgtgtggctcagcaggttctccagggtggccatgcagatgggatttccacagaagctgaaggtgttgagctcaaagcagcggctcagggcaggcaagatggcgttgacttgggagtctatgatgccacagtcatctaaatccaggtactcaagggtggctgcaactttttctaggagaatttggagaggcacaagactgtaattggtcagtctgatgccactcaggtccagggtctttagttgactgatactcgggcactgggatagatgcttcaagtctgattccaaaagcacacagttagttattgtgaggaactttaacgaggtcttcagacagctggggagagagagcaagaagttaattctggggaatcataggggtgagtggagggtggtggggaatggcttcaaggtaatggatggagacctttttgcccaagtccagggtcattctgatggcctgatggtcaacacttaggatgatgtgtgatgaagagctttgccaccgaggtcaattccactttagacccggcccagtaactcacacctgtaatcccagcactttgggaggctgagactggtggattccttgagatcaggagtttgagaccagcctgctgaacatggcaaaacctcctctctactaaaaatccaaaaattagccaggtgtggtggggggagcctgcaattccagctacttgggaagctgaggcagaagaatcgcttgaacccaggaggtgtaggttgcagtgagcagagatcatgccactacactccagcctgggtgacagagagagactctgtattaaaaaaaaaaaaggagaaaaaataattccatttgaggctgagtcacttcaccatcatttataggaatggatcaagttcacagaatccctaaagctccctttcctcatctgtcaggcagaaaaccacatccctgggccacaggagcccagtggagattcaggcataaaggacaaacccagacaggatcctgcaacatcagctacggtgggcgggctgcaggcatccctgacatgcctgtatcatcagcaaaccatctatcactttcaccattctttgtgcctgcaccctgaccctctgtttcagaatcatgcattgcctagataattaatttacctggagctcaaaagaaacttttacaacagggaattagagatgggatcattcatgttcaccaaactgtggggcacaaagctgattttctgacaagtgcaggtttgctgaacattcccctcttcagtgcccacttcacttccctacttcacatcatcttcttaaaaattatcttgttggctgggcgtggtagctctcgcctataatcccagcactttgggagtccatggtgggtggatcacctgaagtcaggagttggagaataacctggccaacatggtgaaaccctgtctctacttaaaatataaaaattagccaggtgtggtggctcacgcctgtaatcccaggcactcaggaggctgaggcaggagaatcgcatgaacctgggaggcagaagttgctgcgagctgagatgtcacaactgcactgtagcctagacgatcaaagagaaactccatctcagaaaaaaaaagttatcttgtttgtttttacttttgtttattcatttctgacaggggtcttggtatgttagccagactggtcttaaactcctaggctcaagctatcctcttgcctcagactcccaaagtgataggattacaggcatgagccaccgcccctggcgtatttttcatcatcttaacttagacacacgtcctcaggaagaattcagaaaggcaccctcactagatctgaaccccccagtagctggcttcctagcatggcagcctctccatagcatctcccctagctgatccctctgcctctattgggagggttgcatgatacccatttcaggacagggccgcccacaggacaatgcatggacattctagtgtccccttcactgtttcatcctcataggctggctcacagtagatgcccactagtgtttactgtaacaggctctgctgtggtctgcagagaaagctcaccaccctccctcacctgagcagctggtccaggtggccttcgaggaaagaaacagagttcatataaagcttttggaggcagcgcagcttgaggaactgagtggtgaactgggtaacaatctccttcttctgctctggggaaacgtagcgagagacatccatgtgggagagaatgagtttctgaagattcctcatgtggcccaggtatggggtaaactgtgtcaggatgggcagtacccacttgcaattcacttccacctcctggatacagtctaggttcaccattttcaggatgcttctgatattgcggaagggcattcccaaaattttcagcttcttacagcacaggtgtagtaaatctttcctctgcttgacccatagaaggaggcaggtgaggtattcatccagagtcctgttcttgagccaaagttctacgaacacagtcaagggctgccgtcctctcatccttggacagtcctccactggttttttgttcctcttggcattgaggaagcacccatgggccatagcttcagaccaaaccatccagaagttctcacagacatcctgtaaatccagcacttgaagtttccacctcctgtgggaaaatagaggtgagactgagaatttcagaactcatttctgaacttaaactccacatcctggatagcagctcctcccctccctgcttcttgtccctctctctgacttttcttcactctgttttccccttggatcctacccacttccacattgttttgttttttttttgagaccaagtctccctgtgtcgcccaggctagagtgcagtggtgtgatgtcacctcactgcaacctctgcttcccagattcaaatgattctcctgcttcaacctcacaagtagctgggattacaggagcccaccaccatgcccagctaattttagtatttttagtagagttggggtttaccatgttggacaggctggcctccaactcttgacctcagcctcccaatgtgctgggaatacattgtgagccaccgtgcccggcccagttctcacttttcatggtgcctttcagtgccattagaggagaggttcctgttacctccatggaccttgcgtggtgagcagtgctttccctgaggagctggtgaatggccaagtcctctcggcttcctcaccaccaccatcccccttgggcctcctcacttctcacgacgcagctgttccttcagttggacacctgggccctccccaccagcccacctgggccacctcacctgggacgaacccctaggttaagcagtgcatccagcccatcgagcacagcttggaaggcctccagacaaggcatctttatcagaggcctcagagggaggcggcggaagggccaggactgcaccatcagcttcagggcctcacagcgtctcctgctgaaggcctccatgaacagtggggggaaaagttctgtgggcagctcctccagggtggacatggccaaagcttggtcccttagcaggctccgccctgcaagctccaggagtctgggtggagtccagatgctcatcttcatgaatctgcagggaaaacttccagaggacaaacccagagaaaaggcatctctctcgggccaagcccatgcaatctcatcctctcctatggccaaactcactgctctggcaatggtgaaagagtcctcagtttactccaattctactctgtactcagtggccattaagccagcattctgcctctgctgcatcagcatgagcgtctccgaagcagtgaggaagcagggccaccacgagcccttcctttctatccagtgctccatccagtgactagtgagtgtggaggaacctgaaagtgaacccctcctaccattgggggaaactactaattactcaaggttctaaaacaatgggaatgggaatgtcacaagcctacatgcccacattttcagttcctacaaataagcttgttgggaacattcatggggcatccctagaacaggttctatttgttttcttttcattatttaagcttgctttctctttctctctctttcttctttccttctttccctctctccctcccttctttctttctttccccctctctctcccttttttctttcttgtcttctttccctgcctcccttctctcattctctctctctttctctctctccctctctcactctttctgacagagtcttgctgtgtcacccagcctggagtgtagtggtgggatcccagctcagtgcagccttgacctcccagctcaaaggattcttcctcctcagcctcccaagtagctgggaccacagttatgcatcaccacacccagctcatcttttattttttgactttttgtaaagacagtggatttcgctatgttgtccaagctggtcttgaactcctagtctcaagcaatctacccctcttggcctcccaacatactgggattataggtgtgagcctccaccccagcctcattattgaaaatttcagtgagaagctttgaaagctatgtgacactgttatgcatcattctcaagatagatgtttccaatgcacacttgttacacatgttcaaactgaaccactttggctgggtgcagtgactcacacctgtaatctgagcattttgtgaggccgaggcaggtggatcatctgagatcaggaattcaagacgagcctggccaacatggtaaaaccctgactctactaagacagcaaaaattagccaggtgcagtggtctgcgcctgtagtccaagctactagggaggctgaggtaggaggatcacttgaacccaggaggcagaagttgcagtgagctgacattataccactccactccagcctgggaaataggctagattgaactgagagacagagagagctacatttgactagacttcttaatctctacccagttaatccttattggatttttggctttcttaaagattaactgatcgaattagatattgatccatcaaaatgaaagatttagggatagggtgaaagtccaggactcattcactgattcccttcacaaacatggagttttactaatatgtgtccttcaaagtcctgagtgtgagacagggaagggttgaatctcttcctgatattagacagaaagaaagaaaacttgaaagtatctttgttgagggatccttggccacatcaaatttatcaaaatatttcagagttaaaacagttttcaaagacagagatgacagtccctaagaaaacacaatagaaatcttcatgtatccgatgatcacctgggtcatataattgtttttggtgctgagggagctgagtctcacttcgtcgcccaggctggagtgcagtggcaccatcatggctcactgttacctccgcctccaagattcaagcaattctcatgcttcagccttccacatagctgggactacaggcatgcaccccccacagccatgcctccatttgggtggaagaggatgtgattggtttaaaattaaggtcaaagatcctttttgattgattttgtttttgtttttggacagagtgtctctcttttgcccaggctggagtacagtagtggtgtgagcatggctcactgcagcctcaatcttctgggctcaagtgattctcccacaccagccacccaaatagctgggactacagatgcatggtgactcacagctgtaatcccagcactttgggaggccaaggcaggtggatcacttgaggtcaggtgttcgagaccaacctggccagcgtggtgaaaccccacctctactaaaaatacaaaagttagccaggcatggtttcagatgtctgtgacaccagcttctgaggatggagactgaggcatgagaattgcttgaacccgggaagtaaaggttgcagggagttgagatcatgccactgcactccagtctgggcaacacagtgagactccatccccaccctcaaaaaaaaaacgttgtgcagaggagggtttttgtcatgttgtccaggttggtctcaaatccctgggctgaaatgatcctcccactttggcctcccaaagtgttggggttaaaggcatgagtcactgctcccttcaagaattttaaaatggcatcaaccaaagcacaatcaacttttttgaaataaagacagaactgcatttagaggaaaaaattcaaagcttccaattgttcatataaaaaaaaaaaaaaaaaaaggacaggatatagctctgtgccatcgtaggctgcactgtcaccatcccagaccgactgactgtaggtcagatgggagtgtccttacagaaattagtgacttaccagatctggatgtagtctagaaggtgctcagatctcaggaagaaccaagcaggaactccaggcttgaagactttgggtctctcctgtgggtccttagaagcttttactgacctttctaatcacaactcccacccacgcccctccacgtatgcactgctagcttccaatcaaaaagcaatatctgattgcatttgtgaagctccacccagttaatcctgattgggtttttggctttccccagattaatggattgagtcagatatccattcatatcacatatctgtattcagttcgtgaagcaagaaattgacagtgttagggatagggtagaagtcaagaatacattcattcaagggtgggcgaggtggctcatacctgtaattccagcactttggaaggagaaggtgagtagatcacctgatgtcaggggttcaagaccagtcaggtcaaaaaggtgaaaccccgtctctacaaaaatacaaaaattagctgggcatgatggcaggcacctgaaacccagctacttgggaggctgaggcaggagaattgcttgaacccaggaggcaatggttgcagtgagccagatttgtgccactgcactccagtctgggtgacagagggagattctgtcaaaaaataaaaaaatcattcattcatgaactccacaaacactgatggtattttattaatatgtgaacttcatagtcttgagtgtgaggcagggaaggatttgatctgttcccaacattagacagaaaaataaaatctgaaagtagtgttgttaggagatctttggccacatcaaaatataaaaatgctttctactttaaaaagctttataaaaacagaggagtcatccctacgatatcagaataaaaatctcaatgtattgaatggtctttgggattttatataacctaaggtagcagattacatgctcgttctggtggaggagaggtgccactgagggcgtgagtggtctcagtgcttaggttaaggcttctttggaagaaattgaaaccacatcgataaactttataaatttaatcagtgaagaagggagggagagaaagaaaaataaaccaagcttgcaacacattcagcattcatcaggaggtcttcttgctctctgacctggttcctcatggttgctggcagcctactgttccaaaatcatatagaccttagattacagttccccttaacttccctgcagacaacgattcaagcattgtaaaacattaactttttcatctgagatattctttcaggttctgcatgtcagtgaaactactgatgccagctgatctgaagggccatgcaatgcaccaactcaccaaagaatgcagtttctacatcctgttgacttcttccctcttaccactaccccaactttccggccccttgctatccaggatccactggaaaccttcagtactccttggggagatgaatttgaggatctcctcctagcttctcattcagccaccttgtgatcattaaactctctgctgcaaaccctgctgtctcagaatattgctaagctactgtgcagcaggcataggaacctgatggtcctgtaataaagtcatgtcaaaattacaaatggaagtgagggtggagctggtcagggttgagctgggtttttaatgggaacctgggagtgaagcaagacttgctgaacatgttgggggttattgagtgggtgtaagaggaatctatctaacattgcactgatgcccttttggttttaatccttatgaccaagtatgagtctttcaaaacaatttgtataatcctccttatttttcctttcaaaaccttcaacttcctttatctccccaaataatctcgcatctattgccacttctttgcttacttcataataaacttttttttttacagagtcttcttttctgttaagtacaccatatatgttgttgccacacaagatgaataacctggttctatggacagaaagggtcaaaaggatcccattcctcaacagctgggggtgatgtaaaggtcatggttattctttgtcatatctgcacctgcatattgccagtgaaaacttgcaggtcacattgggcaggcttccaaattcaccacctgtggaaggtcttttgcttggcttacatcctgtccctgagtaaagagtctgatcgtgagttcatgagtgctttaaactctacaagtattgatgaaggcttccacccactgacagtgagaaggcactgatttgatgctgatcatgaagttctgctggttgtcttgcaaggaatatgttttattcttttatcttgtcatctaaagccaatgattgtaacctctgtttgtaccttccaatggaaaaaacaaaaacaaaaactcaactctatttgacccttgtcaggtcaataaaacaaaagaaaatttaaaaaaataattgataggaggagttcctttcccagcccaggcaatagagtgagactccatctcaaaaggaaaaaaaaaaaaatggccgggcacggtggtggctcacacctctaatcccagcacttcaggaggccaaggcaggtagatcacgatgccaaaaattgagaccatcctagccaacatggtgaaaccctgtctctgctaaaaatacaaaaattagctgggcatggtggcgcccacccattgtcctagctactcgagagactgaggcatgagagtcgcttgaactcaggaggaggcggttgcagtcagccaagatttcaccactgcactccaacttggtgacagagcgagactccgtctcaaaacaaacaaacacaaacgaacaaacaaacaaagaaaaaagctggaaaaataaattctgaaagaatttccatctctatgaattcatcttcagaagtgatagcatttcctgcttggcattttttgcctacatttttggcataagatctatcaacaaaaagtatgaacccaggtttgtgtaatggaatatcttaaacatcaataggaggagtcaatagttctgatgccacacacacacatgtatggtcttctccatcatcagaaaatggcaacaaagtggtagagttatgcagagtgtagcatttgaaatggagatttgaaggtgacaaggaaaggattttgtaagacattagtgtacaagttgagcaatgttggttcctgtcacaatatttttattgatttatttattttattcatttattttttgagatggagtctcgctccgtcaccaggctggaatgcagtggcacgatctcagctcacttcgacctctgcctccccggttcaagcaattttcctgccttagcctcctaaatagccgggactacaggtgcatgccactacacctggctaattttttgtatttttagtaaagacggggtttcaccatgttaactaggatgttctcaatctcctgacttcgtggtctgtctgccttggcctcccaaagtgctgggattacaggcctcagccaccatgcctggtcggttcacatcaaaatttaagaggtattcaattgcatatgaaatttgtaggcaaagtttatttcttttttctttaaagcattaattaatttatttatttataatgtatttatttattaatttttttttgagatggagtttcactcttgttttccaggctggagtgcaatggtgtgatctcggctcactgcaacctctgcctcccggttcaagtgattctcctgcctcagtcttccagttagctggaattacaggcacaggccaccacacacaactagtttttgtatttttagtagagacagagtttcaccatgttgcccaggctggtctggaactcctgaccacaggtgatgcacccacctcggcctctgaaagtgctgagattacaggcgtgaaccaccgtgcccggcctaaactcatcacttttaatactttctacatcacatgaggaagaagagcagaaacacttgagtacttcatgaaggtcaaggttggtatgagtttgggttctaatatgatcaatttctgcttctagggaaccaagcagttcaggttaaggaaggtcaggaaactctagggttttctctccctccaaagaaagctttacgcatcaacttaacagagaaagcaaatctcatccccatgttgtcacttaataaaaagccatactttcctaaaaatggtccaaatgtcatttggactgcttcaaacacaggaattttctgaacttcatgtgaaacccctcctcagaaatattttcctttctccaagggatttgctgatatattggctgtatactggatatggcagccctggtttccaccaattctgtacctaagtctgcaatgatcttaatctcaccttctccatttttatttaaggctattatagaaaacaatttaccagagagttattttaaattccatcaatatggagacatcagaaatgtcctctagctggatgtggtggctcctgcctataatcccagcactttgggaggctgaggttgtggaataacctgaggttgggagttcgagaccagcctaaccaacatggagaaaccctgtctctactaaaaacacaaaattagccagctgtggtggtgcatgaatgtaatcccagctacttgggaggctgaggcaagagaatcgcttgaactcgggaggtggaggttgcagtgagctgagatcccaccattgcactccagcctgggcaacaatagtgaaactctaccctaaaaaaaaaaaaaaggcagaaaagtaaagaaaaacaaaaaagaaatgtcctctattgtgaacaacctctgggacaaaagcattctgtccaatacagacctggtgcataggtggacaattttcattccaatggcctgtttcaagggtggcaggcaactctagcagggtttctgtgtttacaccaaactggatttgagttttaatagtaaggggatctcccccataaaaaaccaacagaaaataatggatgctatgaagaatatggagaaatgagaaccctggtacaacattggtagttatgtaaattcgtacagctactaaggaaagcagtatggagtttcctccaaaaaataaaaataggattaccacataaaccataaatcccactgctggatatatatccagaaaaaaaaaaagaaatatatccaggagatatctacactaccatgttggtcaggctggtctcgaactcctgacctcaagtaatccacctgcctcagcctcccaaaattctgggattacaggcatgagccactgcactcagcttgcactctcctatttattgtagcactatccacaatagccaaaatttggaatcaacataagtgtccatcaacagatgaatggatcaagaaaatgtggtaaatatacacaacagaatatcattgagctgtaaacatgaaggaaatcctgtcatctgcgacaacatggatggaactggagggcgttatgttgagtgaagtaagccagatacagaaagacaaacatggatgtttgcactcatatttgggaattaaaaaacacgaaacttaaaaatagtaaaatgacggttatcagaagctaggaagggtactgggaaatagagaataagaaggggatggttaatgggaacaaaaacacagacaggaataagatctagggttcagtagcacaatagggcaactcgtgttgacaatagttcatagtaaatttctacataattaaaacaatggaattggaatgttgctaacacaaagaaatgataaattcttgagatggtggctattcctgttaccatgatttgaacattacacattttatgcttatatcagaatttcaggccaggtgcagtgactaatgtctacaatctgagcactttgggaggctgaggtggatggtttgcctgaagtcaggagttcaagaccagcctggtcaacatggtgaaacccccgtttctacaaaaaatacaaaaaatagccaggcatggtggcgggtccctgtagttccagctactcaggaggctgaggcaggagaattgcttgaacccaggaggcagatttctagagacttctgatgtataaatgtctaaaacaggttgatcaatcatggaagacaccagaaagtttccattcaggttccatttatttttgacatttttaaataaccatccttgcaggggtaagtcctgcatcactctagaacttcaggttccatttctaagtctaggacacaggtccctgaaggcctcattgatgccaagtcagcatttttacccagtcctgcccctggctgagtcacctttgtttttccactcacagtgagcacgtgcctcaaatacgtggctgtgtgcttcctttaagaagcggctgaccgggccctgctgctcacacctgtaaacctggcactgtggaaggccaaggtggtcagatcacttgaggtcaggagtttgaggtcagccttcgccaacatcgtgaagccctgtctctactaaaaatacaaaaattagccgggcgtgggggcatacacccacaacaccagctacttgggaggctgaggcaggagaatcacttgaacccaggaggtggtgcttgcagtgagctgagattgtgccactgcacttcatcctgagggacacagtgagactctgtctcaaaaaataaaataaaataaaataaaaataaaataaaataaaaaatataaaaaataaaataaaattttaaaaaatgcacccatgtacaatattttagttcccaagtgtccagaagaaagcttatccatcccacgaaccaggccttccctaggagcaaagatggaagtccactttctcagatggccatgagccacagttagggcaagggacgggaccaaagaagatcctcttgggctgcctgacttccctgagtgtacgcatcagctcagcccgaattggggtgaggatctcccaattgacatgacccttgtagtcaagactctccagaggggcaggatacaactccaggcctaacttgctcagcccgcctgtgtgacgcagcaggtctttcagagcattcatggaggtctcatttccatgaaagttgaaggtggtgagctgggaacagtggctcagggcaggcaggaggaccctgagttgggggtcctggatccgacagtcctttaagacgagggtcttgagagtagcagcaactttctccagcagaactccaaggggctcaagatgggtggtccacattaggatatgaatcagacgcagctcctttagctgactgaggcttgggtactgagacagacactccatgtcccgatcagttaggtaagcatcactgaatataaaggcccccaaggggttcttgaggtacctggggagagcaagaagttagttatgggcaatggtgccagttagaggaggggggtgggaaatcatctcaatggtaaacttgaagtgggcattgagtaattctgcaccttactaccacacaggtgttatagtaactgcaatggggaagcctgtttcacccaaacacaagtttgttcccatcatcagatgatggtctgcatgcaaggtgctgcctgatgaagactcagatcattcaggggcagctccattttaggctcagtcctttcacccttgcctgtgtgattggtaccactctcacacctagtccctcaccctccatcccagaagcatgcacttctgatatcaattatctttcctggagttcaaaacaacgttttacagacagggaattagagcagtttgctaagctgctgaagacagagctgctactgtggaatgcacaggtttgatgtactttctctttttttttttttgagacagtctcacattgtaacctaggctggagtgtagtggcaccgactcagctcactgcagcctccacttcccttgcctcagtctcccaagcagctgggattacaggtgcctgtctgcatgcccggtgacatttttttttgtatttttagtagagacggggattcactgtgttggccagactggtctcaaattcctgacctcatgatctccctgccttggcctcccgaagtgctgggattacaggcatgagacaccacaaccggccacaccttcccttctttcataccatcctctgtatgaagaatgtgttttcatcatattaactttatacactgttcctcacaaggagttcacaaatgcaccctcactagatctgaaccctcaactaaccggctccctacacacctctctctgtggcatctaccccaggccatccctctgcccttatttgagtggtcttgtgatacccatttcaggatatagagcactgaagagcataatgagttgacattctagcgtcccattccctatgacatcaccggtggctggcacacagtagatgcccactaacatttactgtgaaaaagaacataagtctgtggtatggtctgcagagaaagctcaccatcatttcttacctgagcaggtgctccaggtgctctttgatattactgatcttttttatataaagcatctgggggtagtacaggcagaggaatggagagtccaagtcaggaatgcacggccactggacgctcacgtacaactcacgctcataaccgaaggctaaaaagagttcacgaagattgctcatctggctcaggtaaggggcaaactttcccgttttattgagagagcactttttccagacttccaactcctggatactgtctgggtatatcctttccaatagatttctgaaacttgaagtgggcattgagtaattctgcaccttactacaacacaggtgcactaggcctcttctgtagtggatccacccaaaaaggtagctcaggcattcatccagtgtactttcctttaggcagaggtctatgaacaccttcaagggctggtgctctcccatccttggacagtcctccactgtctgcctcttactcatggcctctggggagcaggagaggaccctggctccagaccatatggtccagaaattctcatcaacatcccgcaaatccagcacttgaagtttccacctcctgtgagtaacataggggaaaagctcagaatgtaggcaaggacccacccctgacctgagctttcactccacatccaggacatcagtcagctgctcctgtcctcagtgctcctccttctgtctcttctccatcctgctccctcttggattctgcctggtacccacttctagtacctttactttctgctgggaggaaacaagctcctgtttcctcagtggaccctgtatggtgagcagaccttttccagaggatctgggcaatggccaaggcctctcatgggcaccgtcagaagcctctgagccaccctagctccccaaccccaccactcctcctgagccagctgtcccttccctggatgcctggacccttccccgaaagccacctgagtcacctcacctggggcgaaccttctgggccaccagtgtatcaagtcccctcaggacagcttgcaaggtctccagatgaagtgtcttcatcagggatcccagagggaggctgaggaagggccaggcctgcaccatcagcttcagggcctcaaaacgtctcatgctgaaggcctccatgaacatcagagggaagacctccctgggcagctcatccagggtgaagatggtcaagaactggttcctcagcaggctctgccctgccagctccagcagtctggatggggcctggaggctcattctgacaaatctccgaggaaaaactctagaggacaatcaagtgaaaaggcaagtttctcgggccattccccagcaagccccacttctcctagggccaaagtcatttctctagcacgtgtgaaagagccctcagtttactccaattccgttctgcaataagtggctacagaggcatggttctgcccttctggtaccaagaagagtgtgtcccaacctctaaagagcaggcaagatccttcctagtccatgaattattagccactgttgcaataaactcatagcactgggaaatgttaccgaggatctctgaagctcggatctcatgcccagctaatcttttattttttgactttttgtaaagacagtgggtttcactatgttgtccaggctggtcttgaactcctagactcaaacattccacccgccttggcctcccaaagtactgggattacaggcgtaatcctcttccgggactcattattgaaaatttcaccaagaagctttgaaagctgtgtgacagtgttatgcatcattcgcaagacacaggtgtttccaatacacacctcttacgcatgttcaaaatgaaccactttggctgtgcgcagtgactcacacctgtaatcccagcactttgggaggcagaggcattggattatctgaggtcaggagtttgagaccatcctggccaacatggtaaaacactacctctactaaaattacaaaaattagccaggtgcagtggtctgcgcctatagtccaagctactagggaggctgaagcaggaggatcgcttgaacccaggaggcataggttgcagttagctgagattataccactacaatccagcctgggaaattggctagattcaaaaaagagagagagagagagagaactacattggattagacttcttaagctccatccagttaatcatgattggatttttgtctttcttccagattaactatcaaattagatattcatccatgaaagtgaaatatttagggatatggtgaaagtccaggactcattcactgatttactccacaaacatggaattttagtaatatgtgacctttgtagttctgagtgtgagatagggaagagttgaatctcttcctgacattagacagaaagaaaaaaactcgaaagtatctttgttgagagatccttggccacatcaaatttatcaaaatatttcagagttaaaacagttttacaaagatagacatgacagtccctaagaaaacacagtagaaatcttcatgaatccaatgatcacctgggtggtataatttaatttttttcgtgtcggggtagctgagtctcacttcatcacccaggctggagtacagtggtgccatctcagctcactgtaacctctgcctcccaggttcaagtgatacttatgcttcagccttccatgtagctgggattacaggcatgcacctccacacccatgtctccgtttgggtggaagagttacaatgaggatgtgattggtttaaaattaaggtcaaagatcctctttggttaagattttttttctgtaatagggcctcgcaatgttgcccaggctggagtacagcagtggtatgagcatggctcactgcagcctcaatcttctgggctcaattgtttctcccatgtcagcaacccatacagttgggaagacagatgcatgctaccatgcccggctaattaaaaaatatgtatattttgtagaggccaagcaccagtggctcagggctgtaattccagcactttgggaggccaaggcaggtggatcacttgaggtcaggagtttgagaccaacttggccagcatggtgaaaccccacctctactaaaaatacaaaaattagccaggcaagttggcagttggatgtaataccagatactcaggaggctgaggcatgagaattgcttgagcctgggaggcagaagttgcaatgatttgagatcgtgccactgcactccagccttggaaacagagcgagactccatccccccttcaataaagaatattttatagagatgggtttttgccgtgttgtccaggttggtctcagacccctgggctgaaatgatcctcccgccttggtctcccaaagtgttggggttaaaggcatgagtcactgctcccttcaagaattttgaaatgacataaaccaaagcacaatccaattttttgaaataaagacaaaactgcatttaaaggaaaaaatgcaaagcttcaaattgttcatatgagaaaaaaaacaaaacaggatataactctatgccatcttaggctgcactgtcaccatcccagaccagctgactgtaggtcagttgggagtgtccttacagagagattagtgacttaccagatctggactcagtttggagggtgctcagacctcaggaagaactaagcaggaactccaggcttgaagactttgggtctcttctgtgggtctttagaagcttttattgacctttctaatcacaactcccacccacacccctccacgtatccactgctagcttccaatcaacaagtgatatctgattgcatttctgaagctccacccagttaatcctgattggggttttggctctccccagattaatggattgaatcagatatccattcatatcagatatccatattaagttcatgaatcaagaaattgacagtgttagggatagggtgggaatcaagaatgcattcattcaagaccgggcaaggtggctcactcctgtaatcccagcactttgggaggacaagttgggtgggtcacctgagttcagacattcaagacgagccaggccaacaaggtgaaaccccgtctctacaaaaatacaagaattagacagggacgatggcacatgcctgtaatccagctactcaggaggctgaggtgggagaatcgcttgaacccaagaggcaatggttgcagtgaaccaagattgcaccattgcactccactctgggtgacagagggagaatttgtcggaaaaaaaaaattcattcattcatgaacttcacaaacactgatggaatttcactaatatgtgacctgcatagtcctgagtctgaagcagggaagggtctaatctttcccagatattagacagaaaactaaaatctgaaagtagtattgttgggagatctttggccacatcaaaatcacaaaaatgttttatagttaaaatagctttataaaaacagaggagtcgtccctacaaaatcaaaataaaaatctccatgtattcaatggtcttgtgggttttatatcacctaaggtagcaattttttcactcctgctggtggaagagaggtgccactgaggacctgagtggtctcagggcttaggttaaggctactctggaagaaattgcaaccatacttataaactttataaatttaatcagtgaagaagggagggggagaaacaaacataaaccaagcttgcagtgcattcagcattcatcatgaggtcagcttgctctctgacctgcttcctcatggttgctggcagcctgctgtcccaaaatcatgtagaccttagattacagttgcccttaactgccctgcagacaacaatttaggccttgtaaaacattaactttttcatttgacatattctttcaggttctgcatgtcagtgaagctactgatggcaggtgatctgaagggccctgcaaggcaccaactcaccaaggaatgcagttttgacatcctgatgacttcatacctcttactgccaccaaactgcaccaactttccagcctcttgctatccatgatcctctgaaaactctcagtacttcttggggagatgaatttgagggtctcctcccagcttttcattttgccaccctgtgatcgttaaactctctgctgcaaaccctgctgtctcagaatattagtatgctactgtgctgcaggcataggaacctgatggtcctgtaaaaaaagtcatgtcaaaattacaaagggaagtgaaggtggaggctggtcagggttgagctgtgtgttttaatgggatccggggagtgaaccaagacttggtaaacatgttgggggttattgagggcgtggaggaggaatctttccaacattgcactgaggcccccttggtgttgatacttgtgaccaagaatgagtcttccaaaacagtgtatgtaattctcctgatttttcctttcaaaacctttgtcttcctttacctccctgaataatctcacatctattcccattgctttgctcatttcataataaaaatcctttttttttttaaaagaatctctttctctgtgaagtagaccatatattttattgccacacaagatgagtagcctggtattatggagagaaagggtcaaaaggatcccattccccaccagttgggggtgatataaaggtcctggttattatttgtcatatgtgcacctgcatattgccagtgaaaacttacaggtcacatttttcaggagtccaaattaaccacctgtggaaggtcttatgattggcttacattctgtccctgagtaaagaatctgatcttgagttcatgagtgcctcaaactctgcaattattgatgaagcttcacccacttacagtgagaaggacactgatttgattctgatcatgaagtttcactggttgtcttgcaaggaaaatgtttaacttgttatgttgtcagctaaagtcaatgattgtaacctctgtattgtaccttccaatggaaaaaacaaaaacaaaacaaaaactcaactctatttgagccttgccaggtcagtaaaacaaaagaaaattaaaaaaaaaaaactgataggaggagtctcattcccttcttttaacttttctcacaaaagcattccaacttgtaacagactttggaacacacccactttgttggtctgtgtcttccacattgattctcacatttagcttccaatgaagatttatttaattatttctgccttaagcgccttaccttccactgacaccaggttgcatggtgacagtttgaactggggtgggatgaaaaaatatttttatgaattttattaaataatccttgcatgtcatctccattgaagaatgaatagggtcttctccaaatatgtgctgagtatggatgcatccaataaatgaaactattgtttatttcatatagtagagctatagatgcattctatttgcctcgagtttccaatgaacaaatgtctagtttcagtaagttctctgattatatggcagaggataacatggtcatgttctgattctgtgtctatgtcaatacttatagcatttcagtcttcataatgtgtgtcaaatgaaagagtttgattctagggggagtctgggacactacctagattagacccggttacactaatgtttcctatgcatggagataagttacaagtaatgaaatcaacaatagtcataggccacccatttgcatctatagcttctgctcagtgccaagtcatttaattatcaatattaaccaaccgtgtgtgagagcaggttctactattagttgtgatccttcccattcatctaaatgactccatagccagtaattgctttggttagtgagaatggctaaattttgaataggagaacttagaaagtgtttgctttgactggtgaaagtacgtaacaaaataaaatgtaggcttgatcactttgtgttaatacaaaacaaaaccaagtctcagtcaatggaaggagatcaaatggagttttgtcccattttcttaaaaaagctgtctaccatgtgatgatgtctgcttctaagaaagactttgttccttggttatccttaattttaagtcacctggtatggtcccatccaatgctgctcatgggcagatttcccttggtgtcattttaaaagatgcagtctccaaatggtagggcatgaaggtccagtgatcatcgaaaccctccttcaccaactggaaataggctttgaaaggtcttgcagtactgagtcatattgttactgaacgatgggctcactctcctaagtgcatagaaaagcaaaaaaggctgggcatggtggctgacacctatatttgcagcacattaggaggccaaggtaggcggatcacaaggtcaggggttcgaatccagcctggccaatatggtgaaaccctgtctctatgaaaaatacacaaattagctgggtgtgatgacccatgtctgtaatcccagctacttaggaggctgaggcagaagaatcacttgatcctgtgaggcagaggttgcagtgagtcgagattgcacctctgcactccagcctgggtgacagagcaagactccattttgggaaaaaaaaatttattaacagttaactgggctgggcacagtggcttatacctgtaatcccagcactttaggaggccaaggtgggcggatcacaaggtcaggagctccagatcagcctgaccaatatggtgaaactccctctctattaaaaatacaaaaattgctctccctctccctctccctctccctctccccacggtctccctctccccacggtctccctctccccacggtctccctctccctctctttccacggtctccctctgatgccgagccgaagctggactgtactgctgccatctcggctcactgcaacctccctgcctgattctcctgcctcagcctgcccagtgcctgcgactgcaggcgcgcgccaccacgcctgactggtcctcgtatttttttggtggagacggggtttcgctgtgttggccgggctggtctccagctcctaaccacgagtgatccgccagcctcggcctcccgaggtgccgggattacagacgtagtctcgttcactcagtgctcaatgttgcccaggctggagtgcagtggcgtgatctcagctcgctacaacctccacctcccagccgcctgccttggcctcccaaggtgccgagattgcagcttctgcccggccgccaccccgtctgggaagtgaggagcgtctctgctcggccgcccatcgtctgagatgtggggagcgcttctgccccgccgccccttctgggaggtgaggagaccctccacctggcagccgccccgtctgagaagtgaggagcccctccacccggcagccaccccgtccgggagggaggtgggggtcagcccccgccaggccagctgccccgtccgggagggaggtggggggtcagccccccgcccggccagccgcccagtccgggaggtgaggggcgcctctgcccggccgcctctactgggaagtgaggagcccctctgcccggccatcaccccgtctgggaggtgtacccaacagctcattgagaatgggccatgatgacaatggcagttttgtggaatagaaaagggggaaaggtggggaaaagattgagaaatcggatggttgccatgtctgtgtagaaagaagtagacatgggagacttttcattttgttctgtactaagaaaacttcttctgccttgggatcctgttgatctatgaccttacccccaaccctgtgctctctgaaacatgtgctgtgtccactcagggttaaatggattaagggtggtgcaagatgtgctttgttaaacagatgcttgaaggcagcatgctcgttaagagtcatcaccactccctaatctcaagtacccagggacacaaacactgcggaaggccgcagggtcctctgcctaggaaaaccagagacctttgttcacttgtttatctgctgaccttccctccagtattgtcctatgaccctgccaaatccccctctgtgagaaacacccaagaatgatcaatatataaataaataaataaatatacaaaaatacaaaaattagctgggcatggtggtgcatgcctgtaatcccagctactggggaggctgaggcaggagaatcacttgaacctggaaggccaatgttgcagtgagctgagatcatgccactgcactccagcctgggcaacagagtgagactctgtctcaaagaaaaaaataaaaataaaaataaaaaagagttaactgacaagcagataggagacaagttctaaacctgtctccccaatctggggatggtggagcaagcttgcatcatctctccaactggtttcagatgatgccaattcaaacagtccgcctggctgtgttaatagttaagaggttaaacctttttcccatcggacatgcctgagcaatttgggctttgcgtcatcacctgtaacaacttaagcaatgactaatctgttggagttgatcctctggttacatgatcagagctaaaaagtgcaggggatacataatgttctattatcaaaggcataggttctccagtaaatacttaattatcagtgtttctgattgcagttggtgaaaaaaaaataccttatgggggatctggctgtgttttcccatagggggtggtaaaaatttcattaaagtaatccagtcttgctggacatgatggctcacacctgtaatctcagcactttgggaggccgaggctggtggatcacttgaggccaggagttgagcaatctgggcaacatgttgaaaccccgttatctactaaaaatacaaaaattagctgggtgtggtggtatgcctgtaatcccagctacttgggaggctaaggcatgacaatcacttgaacccaggaggcagaggttgcagtgagctgagatagcaccactgaactccagcctgggtaacagagactctgtctcaaaaaaaaaaaaaaaaaaaaaattaacccagtctcctttgttagtttagctaattttagtttcaagataccatttcttcactcgacctttgtagaataccaaggataatgaagttaatggtagtgccattggatctgaaaaatcttatctgtgtgatcacctgcccagtaaacggagttctcctaccactggagatttctccagagatgccccagaaaggaaacacattttataaccatttattcactatggctgtggcatcagcctttctaaaaaggtaagctacaacccatcctgaaaacagacacacaatcacaagaattgtagcctttttacatggctcactgacatcattggtccatgacattcccctttcttgcagctatatgtgtgtatgtctatctattcctatctatatctatacttaatttttattaccatgattcacttccactcccctttccatagatagccactctactctttgacctagccttgaatttgcatgtgacctcttagaatataagtatatagaaagtatttagaatatatacttaagatggctgaataggaacagctccagtctacagctcccagcataagtgatgcagaagatgggtgatttctacatttccaactgaggtaccaggttcaactcactggggagtgccagacagtgggtgcaggacagtgggtgcagtgcaccgtgcgtgagctgaagcagggtgaggcatcgcctcacctgggaagcacaaggggtcagggaattccctttcctagtcaaagaaatgggtgacagatggcacctggaaaatcaggtcactcccatcctaatactgcgcttttctaatgggcgtaacaactgcacaccaggagattatatcccacacctggcttggagggtcctgtgcccacggagccttgctcattgctagcacagcagcctgagatcaaactgcaaggcggcagcaaggctgggggaggggcccccaccattgccgagacttgagtaggtaaacaaagcagcccagaagctggaactgggtggagcccatcacagctcaaggaggcctgcctgcctctgtagactccacctctgggggcagggcacagacaaacaaaagaaaacaataacctctgcagacttaaatgtccctgtctgacagctttgaagagagtagtcgttctcccagcatgcagcttgagatctgagaacgggcagactccctcctcaagtgggtccctgacccccgagtagcctaactgggaggcaacaccaagtaggggcagactgacacctcacacagctgggtactcctctgagacaaaacttccagacgaaagatcagacagcagcatttgcggttcaccaatatccactgttctgcagcctctgctgctgatacccaggcaaacagggtctggagtggacctccagcaaactccaacagaactgcagatgagagtcctgactgttagaaggaaaactaacaaacagaaaggacatccacaccaaaaacccatctgtacatcaccatcatcaaagaccaaaggtagataaaaccacagagatgggcaaaaaacagagcagaaaaactggaaactctaaaaatcagagtgcctctcctcctccaaaggaacgcagctcctcaccagcaatggaacaaagctggatggagaatgactttgatgatttgagagaagaagacttcagaagatcgaactactccgagataaaggaggaagttggaaccaatggcaaagaagttagaaactttgggaaaaaattagacaaatggataactagaataaccaatgaagagaagttcttaaaggacctgatggagctgaaaaccatagcatgagaattatatgacgaatgcacaagcctcattaacatatgcaatcaactggaagaaagggtatcagcgatggaagatgaaatgaatgaaatgaagtgtgaagagaagtttaaagaaaaaagaataaaaagaaaaaaacaaagcctccaagaaatatggtcctatgtggaaagaccaaatctatgtctgactggtgtaccagaaagtgatggggagaatggaaccaagctggaaaacactctgcaggatattatccaggagaacttccccaatctagcaaggcaggccaacattcaaattcaggaaatacagagaatgccacaaagatactcctcgagaagagcaactccaagacacataattgtcagattcgccaaagttgaaatgaaggaaaaaatgttaagggcaaccagagagaaaggtcgggttacccacaaagggaagcccatcagactatcagctgatctcttggcagaaactctacaagccagaaagagagtgggggccaatattcaacattcttaaagaaaaatattttcaacccagaatttcatatccagccaaactaagcttcataagtgaaggagaaataaaatactttacagacaagcaaatgctgagatttttgtcaccaccaggcctgccctaaaagagctcctgaaggaagcactaaacgtggaaaggaacaaccagtaccagccactgcaaaaacatgccacattgtaaagaccatcaaggctaggaagaaactgcatcaaccaatgagcaaaataaccagctaacatcataatgacaggaacaaattcacacataacaatactaaccttaaatataaatgggctaaatgctccaattaaaagacacagactggcaaattggataaagagtcaagacccatcagtgtgctgtattcaggaaacccatctcacgtgcagagacacacataggctcaaaataaagggatggaggaagatctaccaagcaaatggaaaacaaaaaaaggcaggggatgcaatcctagtctctgataaaacagactttaaaccaacaaagatcaaaagagacaaagaaggccattacataatggtaaagggatccattcaacaagaagagctaactatcctaaatatatatgtacccaatacaggagcacccagattcatactttttttttttttttgagcagtagcaagatttattgcaaagagcgaaagaacaaagcctccacactgtggaaggggacccgagcgggttgccccacccagattcataaagcaagtacttagtgacctacaaagacacttagactcccacacaataataatgggagactttaacaccccactgtcaacattagacagatcaatgagacagaaagttaacaaggatatccaggaattgaactcagttcagcaccaagcagacctaatagacatctacagaactctccaccccaaatcaacagaatgcacattcttttcagcaccacgccacacctattccaaaattgaccacatagttgggagtaaagcactcctcagcaaatgtaaaggaacagaaattataacaaactgtctctcagaacacagtgcaatcaaactagaactcaggattaagaaactcactcaaaactgctcaactacatggaaactgaacaatctgctcctgagtgactactgggtacataacgaaatgaaggcagaaataaagatgttctttgaaaccaatgagaacaaagacacaacataccagaatctctggaacacattcaaagcagtgtgtagagggaaatttatagcactaaatgcccacaagagaaagcaggaaagatctaaaattgacaccctaacatcacaattaaaagaagtagagaagcaagagcaaacacattcaaaagctagcagaaggcaagaaataactaagatcagagcagaactgaaggaaatagagacacaaaaaacccttcaaaaaatcaatgaatccaggaactggttttttgaaaagatcaacaaaattaatagactgctagtaagactaataaagaagaaaagagagaggaatcaaatagatgcaataaaaaatgacaaaggggatatcaccactgatcccacagaaatacaagctaccatcagagaatactataaacacctctacgcaaataaacaagaaaatctagaagaaatggataaattcctcgacatacacaccctcccaagactaaaccaggaagaagttgaatctctgaacagaccaataacaggctctgaaattgaggaaataattaatagcttaccaaccaaaaaaagtccaggaccagttggattcacagccgaattctaccagaggtataaggaggagctggtaccgttccttctgaaactattccacttaatagaaaaagagggaatcctccataactcattttatgaggccagcatcatcctgataccaaagcctggcagagacacaacaaaaaaagagaattttagaccaatatccttgatgaacattgatgcaaaaatcctcaataaaatactggcaaactgaatccagcaacacatcaaaaagcttatccaccatgatcaagtgggcttcatccctgggatgcaaggctggttcaacatacgaaaatcaataaacataatccagcatataaacagaaccaaagacaaaaaccgcatgattatctcaatagatgcagaaaaggcttttgacaaaattcaacaaccttcatgctaaaaactctcaataaattaggtattgatgggacgcatctcaaaataataagagctatctatgacaaacccacagccaatatcatactgaatggacaaaaactggaagcattccctttgaaaactggcacaaaacagggatgccctctctcaccactcctattcaacatagtgttggaagttctggccagagcaatcaggcaggagaaggaaataaagggaattcaattaggaaaagaggaagtcaaattgtccctgtttgcagatgacatgattgtatatctagaaaaccccatcatctcagcccaaaatctccttaagctgataagcaacttcagcaaagtctcaggatacaaaatcaatgtgcaaaaatcacaagcattcttatacaccactaacagacaaacggagagtcaaatcatgagtgaactcccattcacaattgcttcaaagagaataaaatacctaggaatccaacttacaagggatgtgaaggacctcttcaaggagaactacaaaccactgctcaatgaaataaaagaggatacaaacaaatggaagaatattccatgctcatgggtaggaagaaccaatatggtgaaaatggccatgctgcccaaggtaatttatagattcaatggcatccccatcaagctaccaatgactttcttcacagaattggaaaaaactactttaaagttcatatagaaccaaaaaagagcccgcattgccaagtcaatcctaagccaaaagaataaagctggaggcatcatgctacctgacttcaaactatactacaaggctacagtaaccaaaacagcatggtactggtaccaaaacagagatatagaccaacggaacagaacagagccctcagaaataatgccgcatatctacaactatctgatctttgacaaacctgacaaaaacaagaaatggggaaacaattccctatttaataaatggtgctgggaaaactggctagccataagtagaaagctgaaactggatcccttccttacaccttatagaaaaattaattcaaggtggattaaggacttacatgttagacctcaaaccataaaaaccctagaacaaaactcataggtgttctcactcgtaggtgagaattgaacaataagaacacatggacacacgaaggggaacatcacacaccggggactgttgtggggtggggggaggggggagggatagcaataggagatatacctaatgctaaattatgagttaatgggtgcagcacaccaacatggaacatgtatacatatgtaacaaacctgcacgttgtgcacatgaaccctaaaacttaaagtataataataatgaaaaaagaatatatacttgcattttgtgtgtgtatttattttaatccacgtatatgctctagtgtatggtgctacagaagagggcctgacaattaattgtccagtcccagacactttggagagtgaagagacgtgttgttataattaattgctttttttttggagatggagtctcactctgttgccaggctggagagcaatggttcgatccaaaccatatcacagggggtaatgctgtcagacaacgtatttctatttcactagtaaaatttctttggaataacagatttggcagtgaatataaacatagcaaacattagacctgatgctctggaccccaactcttgcacaagcctctgactgtggagttttatttgaaaggatgaaaatgagcagcacattgcagggactgggacagtatcatgtcaccgccaaagatgttgacaaacagacattccgtcattccagtcccaccacttacaggctgtctggccttgaaaatttctccctctctctttgaatgtgtctctttctccatcaaatgtgtagaaggataatctcaatcttcaggtaaaaatgctgagcccaaagcatggggcataataaaccctccataaatgttggctacttttgttgacattcaaagacaacaggcataatcaggaaaacagttgaggccacaggggataactcagccctgtgccaaccactccctctgccaggacacaagcttcacatccaccccaggaagaattaagagcaagtcctgctgactctgcctccaggacgtccctatgctgtccatggccactcaagtggacaccaggacctcctgtctggacagtgcaagaatcttctgaagcgtgtccctgccctctggttgtcccctcagggaacacggtcctctcagccacctcggggatgtggaagataggcttcaagtggcctcacaaccctaatcccaaactgccaatgacccctgagtcacccttgcccctggctgcacctctccagtctcatctccctgagccaattcacaacctgccagttcagacactggtcttctcattctctctgtgtttcccctaaagcacgtgaactagtcattttgtccttcttgctggggtctgagtcactggccagtcaaggccaaatgctggatcaatgagacaggaggaggccaatgactccaggccccaggtgagtgaaagggaggcttttatgaactgggtgctatgggagaaccgcaggcccagtgggcatccctacaatgacctcatggtgtttacatgtttatgtgtgtgtgtggtcagctaggaagtcacagctctccagcatggctccatggcacagaaaagtaaaatatcccatgtctctagcagggcaagtttcccgtgagtccagcaagaaggcatgggatctgtggaaaggaggcctctgggaaaaaccccacctttgaggataatgttaaaagctgaacttgagaccctgagaatcctatgtccttcccactccccgcagggcttctcttgatccggccctgactcccggatgcagaagcccagggaggagctgggagacagggaaacttgctgggacgctccatgcatttgtctccaagagggtccccaaacccaggtgcctgcagcatcagggaggctcagagttcctctgtctgcctgaaggaagcctcatttgcatggatccatgtaagttctgagattccttcccacacgtggccacctgcaggtgccccataaattcatcttcccaagaagagccaatggggataggcgaggaccccaaacctgctcccaaccccacatccacaggacagagagggatcacctgaagcacaggccagggggtgagtcctgaccccactgtctcctcctaatcccagagggcagtggagtggccacaggcaccccaccaactcctcctgtaccccaagcccaagatgaacaaacttcccgactcactggcctatcccaacttaaaaaaaagcaggacaactctcccaggtggagaagacaccagctgcctctgcggtgctgagcccaggaggaagatgatcactgttcaaactgccttggcaagttgtttcaaagaaataaaacccttggcttctcagtgctttgagtcacattgcacttagtaaatgttcgttttactaatgtttttcacttccctgtatatttatattcagcagtgagagacctcttcatattccaacaaaaagtgattaaaggatttgggacacctgtgattatccccatgggttattatgatcgctctgcaccgcgcagcctgcagagttatttttctgaccgggattgcagtgctgagcctggtgtcctctgctgagttcattttccagcttccttgcattttattcatcttccctggtagcacccggaattgcaggaagcaatccctggtgctcagtgaaggtctttgaatgaatcaaggggagaggagtcagggggaggcagagggtgtgggaggagtcacatgtgccagaatcttctcttcagacatgtcacagagagtcccctccaggcactcttgttgggcctcagtgctggacattggaggacttttctgactgaggatcattgtgccctctctggatccactggaaagctctgggcagccatgtgagccttggtttgacttccatcctccatgattttccctttgcttgtcagaggaggtttggaataacttggatgtcagggactctgagccagaccccattctttttcattccctcctgaaaagcccagtcctcaccgtcccataaggctctgaccagtgaaaagatggagctgcacgatttccaaagagaatcctttccttggcctcaagccacagctgcttccttctgacctgctgcttgtctttggatccaggatggacactcgccacccgctcttcctctcctgggactccccactctcctgactctgtgcccctggggcaggatggggcagccactaaaacctcatgcagaccagggcacataaagtgtcttgggaactcacagacccaagtccaagccccagtgccccacggtctcagacacaagtccctgcctttcagagacacagctctatgagagccagagaacctggctgcctgctctgctgccacctccctccttcccctttatttcagccccatcagctcctctgatcactccccttcttggccccattcctactttcagtccctctggctctgtccagcctggagtgagggtgcagacctcctcccaccccaggctctgagcacctccctcagcatcaagtgtctgctttcagggtgaccttgtcctcagacttgattggaggaagaaagagaggaagcccctactttagcacacgatgtgcatgaatctgacctggaatcagacccggttgaggaccagagaagggcaacagggccagaacagagattttgactcttagaaatgcacagagggtgaacagctcaggctaagaagagacctgacttggacagaaacagactgactgcattccaggtgcagccttgtcagctctaaggctgacccaggggagcctgggaagggatggcccctgcaccgagacatttcccaggacctcttctcagcctggcacccataggaagaccagaggactcaggtctccttctgcgtgccaggcagggtcaccctccagcagtcctgtcccaggggcctctttagggccagagcagcagctgaggaactccctgctttatggcttctcatgttcaccaaaatagctcaatagaattttgggagaattcctcaatgactgctctggggtgaaggtctcccagcattgtggccatgttctgttgttcaggagatttgggctgaggtatccaggatgcataaagagatacctgccttgacagctcagtctgcaggagggaaacagaagctcagaaatattctagagaccctgagcaagtgcctgggggagctttggtattctggtggagattctgtgagtggagaaggggtcaggtcatcttctcagaggggctctgaaggatgctctgagtttgacagcagatgagcaccttgagaagaacaggtgacaggacatggtagaaatgcccccaagtgcgggattctcactggggtcctgggggtggtgctggaccttctgaattgggcaggaagggaaagtctgtcaatcagttcttttcaacatttagattattgaactccttaggggatcctctgagctcctcaccagaggggtctgtccatcatttgctgcctgaacacgggcaggttcctctccctagccaagtctcagggtcaccactttaaaaatgaggaatatagcaacatgccttagattcctcgtgagggagagctgagatcttggatgaatggtaccagtccctgctgtgccttgtgcatgctcaatcaacagagacactcaggatcacctttggtgctgagctcaccctcagcctcaggctcacaaagtgagggcaggtgaagtagaagccgcactgagcacgtttcagtttaactcgattgcacacatagcagggcattgatagtgaggtcagaaatgtggagaaagaacatttacagaaatattccatgatggagaacatccttcaaagtacttcagttttggaagccagtggcatctccgggctgtttgggtttcatatggaatgggagagaaaggcctggaggactttctggaggcgggggacgttcttgctactttgtgccctaaaatagcagaagaatgactgtgtgatcctgcttaggatgggagccatccctgaacttagcagatcttttaacatgaaatagagcttccaggttttgttggggaaatgtattgtacatttgcacacaatacaaccagatgtgtgcaccgttcttaaagacaggaaggctgagtttctctctctctctttctttctttctttctttctttctttctttctttctttctttcatttccttccttccctccctccctccttccctccctccctccctccctccctccctccctccttccctccctccctccctcccttccttccttccttccttcctccctcccttccttccttccatcctctggcatctgccccagctcacattctcagattccatcttcccaggctgattttccaaggcgagcccatcatttttgggagtaaacacgctttcccttgtagtagaggccaagactgtatctgcctcctctgccctcaaagacaatgttgtgtttgaagagtctgcactgtctcttttgtaattattccctttttaatttttaaactcaatctagacagagtctttcaatccttctgtggagatgcccacaaaatacccaccatgttttatgctgtcttggttccttcccagggttctactagaacacccggtcccatcctgcccagccgccacctcactttgtcattctgtcctgatttccttcagtgaagccttgaccttagtcttgtgatcaatcacaccctccgtggttcccttttcaacctgaacccacatatgacctgccctgttataaaacataaaacccaggtgaccattggataaaggagctttttaatccgttttcttagggtggacatcactgtctttttaaagctgttttaactgtcttaacgaaacgttttgataatttcgatgtggccacagattttcccataaagatatcatcaggttttgttttttctttctaatgtcaggaacagattaaaccttccatgtctctatgaaggtcacatactagtcaaatttcatcagtgtttggggaataaatgaattaatgagttttggactttcaccctgttatttattctttcactttcataaatgcacatctaatttaatcaatgaatcagaagaaagtgtaaaactcaatcaggactaactaggtggaacttcggaatctaatcaggtatcactttctgattggaagctggtgattgagaaggggagggtgtggttagaaacatcaataaaagctcctgagtttgcaaaggagagacccaaagccctggtgcctggaactactgcttgattctctgagagatcccagcaccctacaaactgagtccagatctggtaagtcaccacctccttaggaacatgcccatctgatctgcagccagccagtcagggatggtgacacacagcccaaagtggcacagagaatttcctgtctgttttttcaatttaacagatgtaggttttgatttttcctctaaatatagtattcacttcatccctcaaattttgatttctgcttcatttttctcatttcaaaattcttattgaagcagttttttaaaaaagatattaaaaatttacagttggatgaatttttatgtcttgacatgtgaagttatttgtttctgtgcccttcagctacagttcacacacttagttgtattgtgattttctcgagtcttgttctgaacatgggatttatctctgcccttagactctgtccctaagtgggtgattgtgagtatgtagaagggatgagtattggatccttcatctgagacttagtgtttccacccgcaccttccaagtgctctagaatactgccacactgcttttatagtttctcttataatttttcaaaataaaaacaagtggcattgattttaaggagtcacttcagtcttccccaagcatgctaattgtgtaaactgagaatgcaggctgtgtggggccacaggacagtcattctcattgtttttgggtggtaagtaacaaaaaaatttccctcaaaaaggtggagcttagctttcaggatcctgagtgacagatcccagtaatcctgagtttcagtggagcaatgtatagaaattaatgggccactggccacctcgtcccctccttggtgtttggaagacattctttgtggtagtcacaggggcacagatacagatttgtggccaccaagtgcagaatggaactggggggaattgagggcttttccacctccaccagagcaatgagattagcaataggagaagatgaggtgatcatatttggcctgagagtgatgccttttctctggatttgtcctctagagttttcccttgcagattcatcaagatgagcatcagggccccacccagactcctggagctggcaaggcagaggctgctgagggaccaggccttggccatctccaccatggaggagctgcccagggagctcttccccacactgttcatggaggccttcagcaggagacgctgtgaaaccctgaaaacaatggtgcaggcctggcctttcacccgcctccctctagggtccctgatgaagtcgcctcatctggagtcattaaaatctgtgctggaaggggttgatgtgctgttgacccaagaggttcgccccaggtgaggtgacccaggtgtccaggtggggagggcccttttgtccagggtagggacagctgtttcaggaggaggaggggcaccatggaggcccagaggtttctgatggtgccagtgaggaagctcaggaaggccttggccattgcccagcccctctgggaaaggactgctcaccatgcagggtccactgaggaaacagaaacttctcttctagtggctctgaaagctacaggcaatggggatgaggcaaaatccggagggaaaaggggttggacaaaatcagagagggaaaagtggcagagaggagaacagctgatgtctgggatgtaaataaaagctcaggtccttgccttagtttggagcctctcttctcctttacccacaggcagtcaaaacttcaagtgctggacttgaggaatgtggatgagaacttctgcgacatattttctggagctactgcatccttcccggaggctctgagtcagaagcaaacagcagataactgtccagggacaggcaggcagcagccattcatggtgttcatagacctttgtctcaagaacaggacactagatgaatgcctcacccacctcttagagtggggcaagcagagaaaaggcttactgcatgtgtgttgcaaggagctgcaggtttttggaatgcccatccacagtatcatagaggtcctgaacatggtggagcttgactgtatccaggaggtggaagtgtgctgcccctgggagctgtccactcttgtgaagtttgccccttacctgggccagatgaggaatctccgcaaacttgttctcttcaacatccgtgcatctgcctgcattcccccagacaacaaggggcagttcattgcccgattcacctctcagttcctcaagctggactatttccagaatctgtctatgcactccgtctctttcctcgaaggccacctggaccagctgctcaggtgaggaaggatggtgagctttctcttcagaccacagcagagcctttctttgttacagtaaacaccagtgggtatgcactgtgagcctgtgaggaagtaagagtgagggaacactagaatatccatgcattatcctgttggtggctctgtcctgatacgggtatcacacaaccatcccaataaagtcagagggatctcctgggctagatgctatagagaaggtgccaagctaggaagctagctactgcagggtttagatctggcgagagtgcatttgtgaattcctcctgaggatgtgtgtctaagttaagatgatgggaaatagggaggtgaagagggcactaaagagaatgcccatcccactcctatattttaaaatatgaggtctatcctcacctgcctagtgaacaggcaaaatcctatgtttccctgtcagcaccctgttttgagctccaggtcaggtaattaatgtatgggaaatacatgatgatagaatagagggtgagggagcaggagcaaagaatggtaaaagtgatagatggtttgctgatggtacaggcatgtcagggtcccctgcaacctggccaacccagctgatgttgcaggatcctgcctgggtttgtcatttatgcctgtgtctccatcgggctcctgtggcccagagatgtggttttctacctgacagatgaggaaagggagacttagagttcatggacttgatccaatcacctcggtgatggtgaaggactgagcctcgattgggactgcactgaaggaacagagtctccattcccacaccccaggtgctgactatcctcagatgagcagagcagccctgggttatggagagcatcatctctcaccctgaagtcatccccacctctctcctctaactccttcttgttctctcccaggtgtctccaggcctccttggagatggtcgttatgaccgactgcctgctgtcagagtcggacttgaagcatctctcttggtgcccgagcatccgtcaattaaaggagctggacctgaggggtgtcacgctgacccatttcagccctgagcccctcacaggtctgctggagcaagttgtggccaccctgcagaccctggacttagaggactgtgggatcatggattcccaactcagcgccatcctgcctgtcctgagccgctgctcccagctcagcaccttcagcttctgtgggaacctcatctccatggctgcccttgagaacctgctgcgccacaccgtcgggctgagcaagctaagcctggagctgtatcctgcccctctggagagttatgacacccagggtgctctctgctgggggagatttgctgaacttggggctgagctgatgaagacaccgagggacttaaggcagcccaagatcattgtgttctgcaccgtcccctgccctcgctgtggcatcagggcctcctatgacctggagcccagtcactgcctctgttgaatgcctgccatcagggtggatatatttcaagctttcttctggtcatttcggagctgaaacctaggccatgagtgcatgttaaagggagcacagacccatcgtttcaaatgcctcctcagtgtgaatgggaaaggaatgaggatgcaggaggggcaggactgggggaaaagttgacttggagtggatgggctctttagagacctgtgtcccagagaatcagaaatgggaatctgaattgctagagtgagaatcagggaggagagacacatgagagggttacccctgcacagatggttgtaaagtaacagtcagaaataaagggaaactgagtggaaactatctggtgtcctccgtaattgcttaacatggcttaacaattaaacaatttaaacctaaaaaagtccagttactgatcgagctaataaggcactgatttgtctgtgactgatgaggttcagctcctggaaatcaaaccatcaaaatggaatttgatcatttagatcaatccccctcctgttaccttcttgctattctctgtgcctatttagtggcacatgagagacgcacacagggcctgaagcattctaagtgcaaagtgagtgtcagccacttaagttaagccccttcaggtgccctcattctgtcctgatgccgagaccctgttcactctcaatgggtggattcagagctctcagttcctgaccgttacctgtgctgggaaaggacttcactgcccaaggcgtggccctgccctggaaggggagctccacactgtatgagcaggagcctcagggcatcactaacccatgcctgtcatggtgggtagcggcccttgctgaattaaagtagttgtggccaataaagacatccaaattcccttttagcaaaatgctgacattatgtaggcatataatacctgtaacatcaatgaaagaccttttcttaactcctcctttttctccctgtgaaggaagactagtgcatggtagtaggaatcacacatccttagagggtggataatgatcaagtgcctgtgggtaattaatgaccacacctgtgctgaaggaccctacacaaagggcacctaagtgtagaaccctgccgaggactcaggggctggtgctgttgggcacgaaacagccaagaggctcagcttccctgtaaaatgaagatgatgatgccaccaccctatgagactatcgtaggacccaatgagatggtgtatggtcaggacttggaatggggcctggcatacagtaagagctcaatatatgcatcttgttcttttttttttcccctcctaatagaagtcccatcattcttcacccttcaatctcaccttctattcctgataatagggaggcagcagaaacccacggcaggcaatgggactcaacttctacacaccaccaccaccacttaatcgtgattcccccaaacagcagagcctcagcagccagcagaggttgggatgggtggggcaggactgagttcatctctagtgatcatgagataaaaatttccaacccatgagactcatgtgccatctgctggttggtcagaccatctggtgtaattcattgatgcaaacaggatgatattgagtggtatctccaaaaatctgctgttatgtaagtgtttatagagaataaatattgtgattcatatataattttatacatattgaatacatatttttacataaatttacgtacataattttatacatattgaatatatataattttatacatattgaatatatgtatattgaaattttaaattataatgggaatttagtattttaaagtatgtagtgcaatattttaaaaaggtttgtaggctgggcacagtggctcacgactgtaatcccagcactttgggaggccgagatgggtggatcacgaggtcaggagatggagaccatcctggctaacatgatgaaaccccgtctctactaaaaatacaacaaattagccgggcatggtgacaggcacctgtagtcccagctactcagaaagctggggtagcagaatggcatgaacccaggaggcagagcttgcagtgagccgagagcgtgccactgcaccccagcctgggggacagagtgagatccgtctcaaaaaaaaagaaaatgtttgtgttggcctgggcagcacgtatactaaagttggaatgacacagagaagattagcatggcccctgcgcaaggatgatgtgcaaattcgtgacaagttccatatttttcaggaaacaacagatgctggagagaatgtggagaaattaggcatgctttgacagtgttggtgggagtgtaaattagttctagcattgtggaagacagtgtggtgattcctcaaggatctagaactggaaatatcatttgacccagcaatcccattactgggtatatacccaaaggattataaatcattctactataaagacaaatgcacacgtatgtttagtgtggcactgttcttaatagcaaagacttggaaacaaaccaaaagctcttcagtgatagactagataaagaaaatatggcacatatacaccattcaatactatgcagccataaaaaatgatgagttcaggtcattttcagggacatggatgaagctggaaatcatcattctcagcaaactaacacaggaacagaaaagcaaataccacatgttttcagtcataagtgggagttgaacaatgcgaacacatggatacagggaacatcacacactggggcctgttggggggtagggatggtgggggagggttagcattaggataaatacctagtgtagatgatggcttgatatgtgcagcaaaccaccatggcatatgtatccctatgtaacaaacctgcacgttctgcacatgtgtcccagaacttgaagtatatttagaaaatgcttaatgtggtgttgagtctcaaataaaatgacaccttcaaaactgattttaaagatcaatgaataagaattgctcttatttaaaaatatttaagtttatacaattttggagctggaaggaagtgcaatatttttagggatatatgatttattttcttagagcagttataaggttgcagtgaagttgagcagaaagtggatcattcccacatacttcatgaccccactctagcgcggactcctaaaggatcaacgtcctgccccagcgtggtccatttgctccaatgcatgaaccacacgaaccatccttatcacccaaagttcataattaacattaagggttcacatctggtgctgtatattctatgagttctgatgaattgaggatgacatgtattcacccttatagcatcatgcagagtagcttcagtgccctaaaaaaatcacctgttctctttctatccatcccactctaccctgactccttgcaacccctgggctttctactgtgtccatagatttgccttttccagaatgtcatgtggccttttcatattggcttctttcacttggttatgtgcatttaagttttttttatgtcttttagggcttaataatttacactgtcaggatgtgctacagtttattcatccatttatctgctgaagaatatattggtccctattaagttttgtctattatgaatgtagtggttaaaaacatccaggttttaggttttctcatttgggtaaatgccaaggagcgtggctgctggaccatgtgcctaggttgtgtttgataatgattttttccttgacaatctcatgtagacagagactgcttcttcaagggcagggactgtgtctctgtcaccctgtggtcccacagcagagcatggaacctggcaggtggctgtaaatgcttattgatcacatagtgctcagaaatcactttatagccactacaatgcaaatgtcgggcagtcaacatgagctgccaccaataatataaacacgttgaatatggatgaagtcaccctccttttgccggggtcactacctgtgtgtcacggcagtgccgtcatcacatggatgaacttcatctgttttttatagatttccccccatgtaatacaggatacagtctttaaacaaagagtcaccggagttcctgatggccactggtctgagtctgtccctttggaactaagggccctcataactgcacttacctaccacaggcgtccctgtaagcaccactagagggcgagcatcttcaccaaacctgatggacccaagaagtctgacctgaatgtctccctgctaggcaggggtcctcagaggaatcttctatccagtccggatggagggaactggaagagtctcctcaaacccaggaccaacaaagagattccctccaagatcccaattagggagccaggacagggactgagagggaacagggaagggaaggcaccatgggtcccaaaacctggaactgatggagaaggtcccctccagaaactgtttggagagaaccagctgggaagaattaaagtctctgagatcttccacctaagagctggacatctgaattcaggaagacttacccgaggccttcccatggcgcaatcgagaagagttcacgggactcttgccagtgcaggatgcattggttctggaggcatcaggaagagatcggaggtcccctttgaatcccacttctaacaccaatgaggtccactaaaaattatggggtctatagatttagaaaaaaggagcgtaatttcttctaaaggtttacaacctgctcgctgggaaatgggcctccaggcaggacctgaggcaagcgcttggagggagggaaggtgacccaggaatctatgctgaacctgttggccaccaagtgtgcatattcagcaggtcattggagcagctatgaaaattcacagggtgggggatgcatgcatgtatggtaagcaaatatacatgtcacatacatcccaggttcacctggtggttgaggctttacatttaaatgcattataattaggttctctgcatccaaaggagaagttgggacatgaaggtccgcaattcctaactaaagggcctggggagtcaccttctacaaatcacaaagtcccctcagagggggtttatttaaccctatataaagtggcttaaggctgagtgcagtggttcacgcctgtaatcccagcactttgggaggccaaggtgggcagatcacttgaggtcagaagttggagaccagcctgaccaacttggagaaacaccatctccactaaaaatacaaaattacctgggcatggtggtatatgtctgtaatcccagctactcgggaggctgaagcaggagaatcgcttgaacgcaggagacggaggttgtggtgagctgagatcacaccattgcactgcaaccggggcaacaagagcaaaactcggtctcaaaatccataaataaataaataaataaataaataaataaataaataaatacatacatacaataaagcggcttgttttccagcctgactcagggtagcccagagtcttctgatggtgctggtgaggaagctcaaggaggctttggccgttgtccagatcctcagagaaaggactgctcaccatacagggtccactgtgggaacagaaacctgctttttcccagtggaaggtaaagggactagaagtggggagcagtatgaatcaaaagagaaaacggactgagaaaagtcagagagagaacagggagcaatgagaatgaaagcaaaagtcagggatgggtccttctaaattctgagcttctcccttactttacctataggaggtggaaacttcaagtgctggacttgctggatgttgatgagaatgtctgggctggatggcctggaggctaggccctgtcctcctccccagaggccatgagtaagaggcagacagcagaggactatccaaggatgggagagcaccagcccttaaaggtgttcatagacgtctgcctcaaggaaacaccccaagatgaatgcctgagatacctcttccagtgggtttaccaaaggagagttttagtacacctgtgctgtagtaagttggtgaattatctaacacccattaaatatcttagaaagtcattgaaaatagtccacctgaatagtattcaggagttggaaattcacaacatgtcctggctgcatctgataagaaagcttcattgttacctgaaggagatgaagaatcttcgcaaactcgttttctccaggtgccatcattactcgtcggacaatgacctcgaggaatggttactcaccaaattcagcctgtgttcctcaggctggaacacctccaattgcttaaagtaaaattgatcaccttcttcagtgggcacctggaacagctgatcaggtgagaaaggatcgtgcactttctctgaagaccacagcacagcctttttttgttacagcaaacgctagaaggcataacttttgtgtcagccagtggtgacatcacagtgaaggggacaccagaatatcaacacattgtcccattcagtgctccatgttctggagtggctatcacaggatctctgcaatgagggcagcggggtcacctggggtagaggctagagagctacatcatgtacaagccaggtagtgggggtttcagctctactggggggtgcatatgtgaatttcttgttacaaagtgtgtttcaagttgatatgataggaaagaggtaatagaggagggtatgaaaggagggacagcgcatcaaacctgtgcatttcacagtagaaactctgtcctcaccagcttagtgatcacaaatgatcctgtctctattccctgtctgtaaaaggttgttttgaaccccaggaaaggtaactgacatgggaaatgtgtgcttcttgaatggaggctgagggagtaggcgtgagagtggtaaaaagtgataggtggtttgcagatgcaggcacgtcagggagcccctgccagtaggtagccctagctgatgaccctagaccttgctcagttgagttcttcatgcacatctcccaccgggtacctgtggcccagagatgaagttttctgctaaaagatgaagaaaagaggctttagtgatgtgattttgtggccttgaaccaatcacacaagcaatggtgaaaggattgaggctaaactaggactgcccctgaatgatcagagtcctcatcacagagcaacttgcatgtggaccatcatcacatgatgggaataaacttgtgtttgggtgaagcagacatttccctttcagttattccccaccaccttcatctaactggtatcactgcccagaactaacttcttgatctccacaggtgcctccagaaccccttggagaacttggagttaacttgtggctacctattggaagaggacatgaagtgtctgtctcagtacccaagcctcagctacctaaagcatctgaatctcagctacgtgctgctgttccgcatcagtcttgaacccctcggagctctgctagagaaaattgctgccactctcaagaccctcatcttcgagggctgtcagatccactactgccaactcagcgccatcctgcctggcctgagccgctgctcccagctcaccaccttctactttggcagaaattgcatgtctacggacaccctgaaggacctgctgcgccacaccagtgggctgagcaagttaagcctggagacgtatcctgcccctgaggagagtttgaattccttggttcgtgtcgattgggagatcttcgccccacttcgggctgagctgatgtgtacactgagggaagtcaggcagcccaagaggatcttcactggtcccactccctgcccttcctgtggctcatcaccgtctgaggaactggagctccatctttgctgctagggaaggcgtgcctagtggggttgataaatccaaagttctcttccaggcacttggacactaaaatctagtatgtaagtgcaagttatgtttgttttttcttatttccttttttaataattctaaaattttattaaagaacatttgagacagggtttcgctgtgttgccccagctggtctgaaactgctgggcacatgggattctcctgccttggcctcctaaagtgccaggattactggcatgagtgattgtgaccaggccacatgcaacttacaggaagcacagaattctttgcttcaggcaggtgctcagtatgagggaaaaaagataacagcagggggcaagactggaggaaaatgtggaggtggagtcaatgagaccttacgggacccatgtcctacagagtcagaaagagaagctaaagttctacagtgatgagaatgttatccctgcagggacggttaccaagaaatatcagaaataacctcaatgaaaactttctggtgtcctctgtatttgattgacttgttttagcgatttatacatcagaaatctctagttattgagttactgatggaaaagtatcaaagtactctgttgtctgtgattgagattcagctgcaaaacatctaattcccacccattctttttctttgctttttttaaaaaaaaaaaaaaaaaaaaaaaaaaaaaaaaagacaacatcttgctttgtcacccaggctgcagtgcagtggtcccatctgggctcactgcaatcctacccttcggggctcaagtgattctcatgcctcagccactctagtaggtggaattgcatgcaagtgccaccaagcctgctagtttttgtatttttagtagagatgcggtttttccatgttgaccaggctggtcttgagctcctggcttcagtgatctgctgaccttggcctcccaatgtgctgggattacgggtgtgccaatgatctccacccattctttacttctcttcagtcatctgttttttccttacattttcgcctgcaaggagcagctcagtcaggcacaaagggacgggcagagaggggccccgaggagaagatgggcttgaggtggtaggcagagctgggatcaagctacaggggcctttgttgggaagcagaaatggcacctagttcaatgacctggccagctatggggccactgtgcccaccctgctaacagtgccaagttcctgggtgtcgaagggaggttctgtgctaatcctcctggggctgcatttccaagatctgccccccacaggggtgaccacagagactgacgttcctaattgctgggtctggggaccacggtccacccctggaggcaccccaccttggcagggttgtgagccaggcctctgccccgtgttcctgaggcagacagctgtgccacccacaccctctcatggcttaatgagacccgctcccgggtctggagcctctacaaagcctcaaactcactcctcacggcctgctgttagcctgcaatattcttaactagagtgcagttggggctcattcaaccagacccagaagcattgggtttgtttttgcagggttggccagagctgctgtgaacctgcatctcacctgtcacctctgtggagaaacacagagagagggcataactgaggctacatacactttgaacctgatgggatcctgggacaagagggagtcctggccctcccgagttggcaggacagtagctccaaaggcacaactgaagctgcccaggtcgcagttccaaccaaggtcccccagtgctcttgagggctcaggaggtctccccttctcctgcagcatgggggtgtctgctcccactgtgtggtccctcctggcacctgctgtaattttggagcggagttggggtcaagcatgtatgctgtggcagcccagatgagcgtgtgcatgctcaggttcgtgctgatgcaccgtctgcctgctgtcttgaacactctgggctttgggccctgatgagcatgggagggaggctgagagggggctgaggacagatcagtgctggcctttggatgctccttgatgcaagtgacctgggcgccatgggtggtggtgggaggcagacagactcctggatgggaagacgagggtacctggtgaggctctaccttgtgaccaaggcgggcctgaagcccgtgggctggtccaccagtgctatggaccagagtgggaatatgtggtgccttttctgtgcctgccaatggctacctatgacccaagcagcacatacttccttccccatgatgccccaacagccccagactcagggaaaacatcaggatgaacagtggcagagtgaaactacccactcttgggatgattttcctgcagacaagcaatccactctggggccttttctctactgagagctgtggagatgatgagatgactttcctggaaagagcagcagacaccactgtgtactccagggacaaacatggaagctgcttttgctgtgcctggttcatttgcagccttgcaaaaatctggcacctgtgctggcacctgaagctgcctgccccactgctgtgggagccagtgactgtccaaagtgaccagaccccctgctcactcagacacccctcactgctccagtcctgaccctcccttaataggcatgtgatccaggcctgaagcatgagccaagcatagtctaccagtctgagtgggcagaacaaacccagtgaaccccatcaaaactccggcaaaggtgcccccagccatagaggcttctggccagaaaagtcacatcccaaggatttcataagagaaaattacttaaacacaaagaaagacaataagaaaggaaggatggaagagagaagtctctaaccaaccagaaaacaagaaattaaatgggagtactaagcctttatcaataacaacaatgaagacaatatatctcagttctgcaagtgaaagtcttagggtcgttgaatgagtaaaagaataagaccatactatatgctgttttccagaaactcacttcacctataaggacacatgtagtctgaaagtgaaggggtagaaaaagatattccatgcaacacacctgtgtttccagctaactggcagactgacatgggaggatcatttcagcctgagaggccgaggctgcactgagccgagattgcaccactgcacgccagccttagaaacagagtaaggctctgtctttcaaaagaagaagaaagaaaagaaaagcaaagaagatgtctcttcacattttatgctgcacaggcattttttttctgatctgcactgcactgccaagccaggtgtattctgttgagctcactttgcagctgccttgcttcttgtttatcctaagtagcacccagaatagtaggtggcacattacaggcactcagtcaaaggttttttttttttgtttcacatttttttgtctgtttgttttgtttgtttgtttgtttttgagacagagtttcactcttgttgcccacccaggctggagtgcaatggcgtgatctcagctcactgcaacctctgcttcccgggttcaagcaattctcctgccaccacacccgaccaataggaaggggaggcactggatgttaatagtgtcaaatgtgccaaaatcttctctgtggtttttccccagagtctccccctccagggccacctgaaaatcctcagccctggacaatgcaagattttttttgactgaggatcactgtgctccttctagatccatcagaaagtgccaggcagtctgataggtcctggtttgacttacatctagcaagaccttcacctggttggcaggagtagatatgggggtcacttggatgacagggactccagtccagaccccattctacctcattccctcctgcaaagttcaatcctcacagtcctatgaggctgtggcaagtgcagagacagaactgcaccatatccaacgtgcctcccttcccctggcctcacaccaagtctccctccctctgacatgtcccttgtctttgcatccaaggtggatgtttgccattgactctctctccccatgtctccctgctagactgactctttgcccctggggtgagatggggcagccactggaacctcatgtagaccagggtgaaatcaaagggccttagaaactcacagctccacatccaggcacaggtcctttgaggatctcagacacaagtccacagcttatcagggatgcggctctgtgaaagccaaataacccggccccctaccctgctgccatctctctcctctgtgcttactctggcccacatcagctcctctgggccactccctttctgggccctgttcttttccttagtcctcctggctccatccagcctgcagcgagttccgagaccttccccaccccaggctgccacaagcaccttcttaggcatctactctgctttcagagtgacttctcctcagatctttattggggaaaaaaggaggggcagcccctgatcttggaaaagacggtcacaaatgcgacctggaatgagatcctgttgaggactaaagaagtccagcagggcctgaacagtgatttctactgttagaaacatggagagggcaaacaccatgggcaaagaaagccctgactcagaaacagactcactgcattccaggtgcagcctcgtcagctctaagactgggcaaggggatcctagaagggatggccccctgcactgggacctgtcccaggctctgccaacagcctggcacttctaggaaaaccagaggagtcagctcttcctgtggaaggcagacaaacttcccctccattggtcctgggtgcctctttaggtccggaagagcagctgaggagctccctgctttgtgccttgctatgtgcacccaaaaagctcagtagaatttggggagaatgtatgagtcactgctgattccagggagagtgtctcttagcattgtttgtggccatagtcctcggtgcaggagagatcggctgacatttccaggaagcagaggattcagcttctctcacagctcaggctgggggaggaaaacagaaattcagaaatattttagagaccccaatcaaaagcctggagaagctttggaatcccagtagaaattctgtgagtggaattgaagtcaggccgtcccttcagatgggctctgaaagctactctgacctggacagcagaggagcaccttcagaagcacaggcaaccagaacatggtagaaagaccccccaaactgcaggattctcactggggtcctgaggatggtgcaggattcccccaagaggttcatttttctcccaaattcttcagatacacagcttgcaccattcatgcttccagattgaaaagtctccctccttatgtctgaccacactgctcctctctgggctctgccccagctcacacactcagattcactcttcccaagctggtattctgagggaagcccatcctgtttgcgagtaatgatgcttcaccttccagtaggagtcaagattgtgtctgccctctctgccctcaaagacactgtgatgttttacgagtctgcattatctcttttgtaattaggtttttttaatttttaaactcaatgtagaaggaagtctttcaatccttttgtctagatgcccacaaaatacctgccatgttttttgttgtcttggttccctcctagggccccattagaacagtcagtactgtccagcccaacctccacctcactttgtaatttaggcctgatttctttcagtgatgccttgaccttaaccttgagataaattacaccctcagtagttcctgtcttccacctgaatgggcatatgatctaccatgttaggtagcgcaaaacccaggtgaccagtggatacactgagatttttattgtgtttttagggatgacatcactgtcttcttaaagctgttttaactctgaaaagttttgatacttttgatgtggccaaaggttctccaataaagataccatatataaatatatgtatttctaatgtctgaaacagattaaaaccttccctgtatcactatgaaggtcacatattggtaaaactttaccaatatttatggaataagtgaataaatgagttttagtccttcaccctattattaattctttcactttcataaatccatatctaatttaatcacttaataagaagaaagttgaaaactcaatcaccgttaactgggtggaagttcaggatccagttggatgtcatttttggattggaagttggtaattgagaagggggttgtggtgagaaaagtcaataaaactcctgaagatgcacagaagagacccaaagccctggctcctggagctactgcttgattctcagagaggtcccagcaccctgcaaagtgagtccagatctggcaagtcaccacttattagggatgtgcccgtttgatctgatgttctgtatagcatgtcacacaaaagtctggaagacactagcacatacactgtgaagagaagtctcaaaaaaagggaaggttatagaagacacttgctctgtgtttttggaatgttttgcattgagaattctgtccagagaagggaaaaagaatgaaaaacaaaggaagctcacccaaatgtacctctatgtaccttttaccatgctggactttcttttgttttgttttcttttctctctctctctcttttttttttttttttttgatatggcatctcgctctgttgcccaggctggagtgcagtggcatgatctttgatcactgtaacctccacctcctgggttcaagcaattctcctccctcggcctccccagtagttgggatgatacttgccaccacgcccagttaatttttgtatttgtttttattatactttaagttttagggtacatgtgcacaatgtgcaggttagttacacatgtatacatgtgccatgttggtgtgctgcacccagtaacttgtcatttaacattaggtatatctccaaatgctatccctccccactccccacacaacaggccccagtgtgtgatgttcctcttcctgtgtccatgtgttctcattgttcaattcccatcctatcacaaggacaaaaaaacaaacaccgcacgttctcactcataggtgggaatttttgtgtttttaatagatacagagtttcaccgtgttgcccagactggtctcgaactcctgacctgaagtgatccatgcgcctcagtctcccaaagtgctgggattacagacgtgagccaccacaccgggccaattgctggactctcatgtcacacatggatatggtatcacaaaggcaattttttccataatccaatgtatttatattattggtagtgagctaatgttgacgtccctaagttagcaattcagtggctatacccatgacaaacgtttccatgcatcacgtggtcaacagcatttgcttctgggttcaagagattctcttgcctcagcctcctgactatctgggattacaggggcccgtcaccaccccaggctaattttttgtatttttagtagggacgggtttttaccacattggccaggctgctctcaaattcctgacctagtgatctgcctgcctcggcctcccaaagtgctgggattacaggcgtgagccaccacgcctggccattaaccattcttaaaatatcacattgcattctttaaaagttttatatctttcatatacataaattacaacacaaatatttatactcaactagtattcacattatagtaaattttcttttcttgctctgttgcccaggctggagtgcagtggtgcgatctcagctcactgcaaccttcgcctcccgggttcaagcgattgtcctgcctcagtctcctgaatacctgggattacaggcgaatgccaccacgcccagcaattttttttgtattttgagtagagacggggtttcaccatgttggccaggctggtctcaaaatcctgacctgaagtgatctgcccgcctcagcctcccaaaatgctgggattacaggtgtgagacaccaagcctggccatgacaatggcctcagcctcccaaagtgctgggattacagacatgagccaccgctcctggctcataatagtaaatttaaaaaaataccatataatataatccttgcaacattaaattacaccatctgatctgatctaccagcagatggcacccgagacctatggattggacattttactcttcttaggaatgaatccagtccagaaatgcccaccctgccccctgctggctcctggggctctgctgtttgggggagtcatgatgaagttgtggcagagggtagaagatgagccccattgcatgccctgggttcttgttgcctccctgttatcaggaataggaggtgagatagattgaaagatgaaaattgctgggacttctgctgagaagagaaaaaagaacaagatgtattcatctaactgtatgccagtccccatgccaagccctaaacatgaaccatcttattggatccttgcagggtcctataagccgttggacatcatcctcattttacagggacctgaggctcttggttaagatccctgacagcaataccagcccctgaatcctcagcaggatccttcacttgggtgcccattatgcaggcttcctcagcacagggaaggtcactcatcacccacaggcacttgattgttatccaccctttgatgatgtgagattccagaacacgctgcactggtctcttccttgatagggagagaggggaggtgttatgagaaaatctctcatcgatctgacctagctccctaataagaagtaactttttaaatgtcagatggaaatatttaaaaagtgttacatacctgtgtagttttagtattttacttaaagggaatgtggctgtctttactggctacaaccagtttaattcaagaagggctgctagtcatcaggggaacaagcaagggttggtgctgcccagagtctccagctaatacacaatatggacatccccttccagggcagcgggaagagagtggctccttgtgcagtgaagctgacatccaccaactaaggcttctggaaccatgtggagactcacaaggagtgggcagggtctcagcatctggctagcagtgaaagaccctgagaagaaggtgctttccacgtggattggctcactgttcttgcccagtaatgttccagacccttggtttccacctagtgtgtattaacccactgaacagccacagaaactaacaaggaattaacagacatctaaagaagtgaagaactggaggaggccaagccaatcgtggtggtccacgcctatactccctgcattttgggaggccaaggcaggagaatcacaagctcaggagttccagatcagcctgggcaagacagcgagaccttgtcaccacttaaaaaaacaagcaaacaggcatggttgctcacacgcctgtagtcctagctcctcaggaggctgaggtgggaggatcgcttgaacccaggaaattgaggctgtagtgagctatgattgtgccgctgcactctagcctgagtgacaggagacctttaaaaaacaaaaacaaaaacaagcctgacacagtggctcacgcctgtaatcccagcactttggtaggcctacttgcgtggatcacccaaagtcaggagtttgagaacagtctgaccaacatagtgaggaaaccctgtcgctactaaacatacacaaattagctgggcatggtggtgcatgcctgtaatctcagctacttgggaggctgaggcaggagaatcatttaaaccccaggtggaggttgcagtcagctgagatggcaccattgcactctaaactccaacctggtcaacaagcgtgaaactctgtctcaaataaaagaatgggaggaaactgattacaataaccaaatttcatttaaatgccttgattttcttgggtagcatcttattgattggacaactcagtgccttttgttttttccatcaataactgaagattcctgaggcttaaactggaaaacaggttacttaataatagagggcactagacagttaccactcagttttcctttatttctgattgtttctttacaaccatccatgcaagagtaactccctcatgtattctcaagcctccactctagacattcaaattcccattttccactctacaggacacaggtccccaaagtcccatcgaatccatggcaacacttcccccaagtcctgcccctgcttgatcaccttccctttcccactttcagagcccatgtgtgaaatgatgggttctgtgctccctataggatgtacctaagacctaggttttagtttccaagtgtccagaagaaagcgtttgacatatccacccaaataggcaggcattcaacagcagcattgatctgcctccaggtcataaaatgacctgttgccacagtcagggcagcagtcagtacagaacaagatcctcttggggtgccttaagtccctcactctcttcatcagctcagccctaatttgagcaaatctgctccagcagagagtaccatcagcatcataactctcccggggggcaggatacagctccacgcataagtttttgagtatgattgtgtggctcagcaggttctccagggtggccatggagatgggatttccacagaagctgaaggtgttgagctcaaagcagcggctcagggcaggcaggatggcgttgacttgggagtctatgatgccacagtcatctaaatccaggtactcaagggtggctgcaactttttctaggagaatttggagaggcacaagactgtaattggtcagtctgatgccactcaggtccagggtctttagttgactgatactcgggcactgggatagatgcttcaagtctgattccaaaagcacacagttagttattgtgaggacctttaacgaggtcttcagacagctggggagagagagcaagaagttaattctggggaatcataggggtgagtggagggtggtggggaatggcttcaaggtaatggatggagaccattttgcccaagtccagggtcattctgatggcctgatggtcaacacttaggatgatgtgtgatgaagagttttgccaccgaggtcaattccactttaggcccggcccagtaactcacacctgtaatcccagcactttgggaggctgagactggtggattccttgagatcaggagtttgagaccagcctgctgaacatggcaaaacctcctctctactaaaaatccaaaaattagccaggtgtggtggcgggagcctgcaattccagctacttgggaagctgaggcagaagaatcgcttgaacccaggaggtgtaggttgcagtgagcagagatcatgccactacactccagcctgggtgacagagagagactccgcattaaaaaaaaaaaggagaaaaaaataattccatttgaggctgagtcacttcaccatcatttataggaatggatcaagttcacagaatccctaaagctccctttcctcatctgtcaggcagaaaaccacatccctgggccacaggagcccagtggagattcaggcataaaggacaaacccagacaggatcctgcaacatcagctacggtgggcgggctgcaggcgtccctgacaagcctgtatcatcagcaaaccatctatcactttcaccattctttgtgcctgctccctgaccctctgtttcagaatcatgcatttcctaggtaattaatttacctggagctcaaaagaaacttttacaacacggaattagagatgggatcattcatgttcacgaaactgtggggcacaaagctgattttctgacatgtgcaggtttgctgagcattcccctcttcagtgcccacttcacttccctacttcacatcatcttcttaaaaattatcttgttggctgggcgtggtagctctcgcctataatcccagcactttgggagtccaaggtgggtggatcacctgaagtcaggagttggagaatagcctggccaacatggtgaaaccctgtctctacttaaaatataaaaattagccaggtgtggtggctcacgcctgtaatcccaggcactcaggaggctgaggcaggagaatcgcttgaacctgggaggcagaagttgctgcgagctgagatgtcacaactgcactgtagcctggacgatcaaagtgaaactccatctcagaaaagaaagttatcttgtttgtttttacttttatttattcatttctgacaggggtcttggtatgttacccagactggtcttaaactcctaggctcaagctatcctcttgcctcagactcccaaactgctaggattacaggcatgagccaccgcccctggcctatttttcatcatcttaacttagacacacatcctcaggaagaattcagaaaggcaccctcactagatctgaaccccccaggagctagcttcctagcatggcagcctctccatagcatctcccctagctgatccctctgcctctattgggagggttgcatgatacccatttcaggacagggccgccaacaggacaatgcatggacattctagtgtccccttcactgtttcatcctcataggctggctcacagtagatgcccactagcgtttactgtaacaggctctgctgtggtctgcagagaaagctcaccaccctccctcacctgagcagctggtccaggtggccttcgaggaaagaaacagagttcatagaaagcttttggaggcagcacagcttgaggaactgagtggtgaactgggtaacaatctccttcttctgctctggggaaacgtagcgagagacatccatgtgggagagaacgagcttctgaagattcctcatgtggcccaggtatggggtaaactgtgtcaggatgggcagtacccacttgcaattcacttccacctcctggatacagtctaggttcaccattttcaggatgcttctgatattgcggaagggcattcccaaaattttcagcttcttacagcacaggtgtagtaaatctttcctctgcttgacccatagaaggaggcaggtgaggtattcatccagagtcctgttcttgagccaaagttctacgaacacagtcaagggctgctgtcctctcatccttggacagtcctgcactggtgttttgttcctcttggcattgaggaagcacccacgggccatagcttcagaccaaaccatccagaagttctcacagacatcctgtaaatccagcacttgaagtttccacctcctgtgggaaaatagaggtgagactgagaatttcagaactcatttctgaacttaaactccacatcctggagagcagctcctcccctccctgcttcttgtccctctctctgacttttcttcaccctgttttccccttggatcctgcccacttccacatttttttgtttttcttttgagaccaagtctccctctgtcacccaggctggagtgcagtggtgtgatgtcacctcactgcaacctctgcttcccgggttcaaatgattctcctgcctcaacctcacaagtagctgggattacaggaacccaccaccatgcccagctaatttttgtatttttagtagagttggggtttaccatgttggacaggctggcctccaactcttggcctcagcctcccaatgtgctgggattacattgtgagccaccgtgcccggcccagttctcacttttcatggtgcctttcagtgccattagaggagaggttcctgttacctccatggaccttgcgtggtgagcagtgctttccctgaggagctggtgaatggccaagtcctctcggcttcctcaccaccaccatcccccttgggcctcctcacttgtcatgacacagctcttcctttggttggatacctgggccctccccaccagcccacctgggccacctcacctgggatgaaccccttgggtaagcagtgcatccagcccatcgagcacagcttggaaggcctccagacaaggcatctttatcagaggcctcagagggaggcggcggaagggccaggcctgcaccatcagcttcagggcctcacagcgtctcctgctgaaggcctccatgaacagtggggggaaaagttctgtgggcagctcctccagggtggacatggccaaggcttggtccctcagcaggctccgccctgcaagctccaggagtctgggtggagtccggatgctcatcttcacgaatctgcagggaaaacttccagaggacaaacccagagaaaaggcatcactctcaggccaagcccatgcaatcttatcttctcccaaggccaaagtcactgctctggcaatggtgaaacagccctcagtttactccaattctgccctgtactcagtggccattaagccagcattctgcctctgctgcatcagcatgagcgtctccgaagcagtgaggaagcagggccaccacgagcccttcctttctatccagtgctccatccagtgactagtgagtgtggaggaacctgaaagtgaacccctcctaccattgggggaaattactaattactcaaggttctaaaacaatgggaatgggaatgtcacaagcctacatgcccacattttcagttcctacaaataagcttgttgggaacattcatggggcatccctagaacaggttctatttgttttcttttcattatttaagcttgctttctctttctctctctttcttctttccttctttccctctctccctcccttctttctttctttcctcctctctctccctctttctttctttccccctctctctgccttctttctttcttgtcttctttccctgcatcccttctctcattctctctctctttctctctctccctctctcactctttctgacagggtcttgctctgtcacccagcctggagtgtagtggtgggatctcagctcagtgcagccttgacctcccagctcaaaggattcttcctcctcagcctcccaagtagctgggaccacagttatgcatcaccacacccagctcatcttttattttttgactttttgtaaagacagtggatttcgctatgttgtccaagctggtcttgaactcctagtctcaagcaatctacccctgttggcctcccaacatactgggattataggtgtgagcctccacccctgcctcattattgaaaatttcagtgagaagctctgaaagctatgtgacactgttatgcattactcacaagatagatgtttccaatgcacacctcttacacatattcaaagtgaaccactttggctgggtgcagtgactcacacctgtaatctgagcattttgtgaggccgaggcaggtggatcatctgagatcaggagttcaagacgagcctggccaacatggtaaaaccctgcctctactaagacagcaaaaattagccaggtgcagtggtctgcgcctgtagtccaagctactagggaggctgaggtaggaggatcgcttgaatccaggaggcagaagttgcagtgagctgacattataccactccactccagcctgggaaataggctagattgaacagagagacagagagagctacatttgattagaattcttaatctctacccagttaatcctgattggatttttgcctttcttaaatattaactgatcaaattagatattcattcatcaaaatgaaagatttagggatagggtgaaagtccaggactcattcactgattcccttcacaaacatggggttttactaatatgtgtccttcaaagtcctgagtgtgagacagggaagggttgaacctcttcctgatattagacagaaagaaagaaaacttgaaagtatctttgttgagggatccttggccatgccaagtttatcaaaatatttcagggttaaaacagttttcagagacagagatgacagtccctaagaaaacacaatagaaatcttcatatatccaatgatcacctaggtggcataagtctttttggtgttgagggagctgaatctcacttcatcggccaggctagagtgcagtggtgtcatttcggctcactgttgcctcggcctccaagattcaagcaattctcatgcttcagccttccacatagctgggactacaggcatgcaccccctgcagccatgtctccatttgggtggaagaggatgtgattggtttaaaattaaggtcaaagatcctttttgattgattttgtttttgttttttggacagggtgtctctcttttgcccaggctggagtacaggagtggtatgagcatggctcactgcagcctcaatcttctggtctcaagtgattctcccacaccagacacccaaatagctgggactacagatgcatgtcaccatgctcggctaatttaaaaaaaaaaaagtagaggccaagcaccagtgactcacagctgtaatcccagcactttggaaggccaaggcaggtggatcacttgaggtcaggtgttcgagaccaacctggccagcatggtgaaaccccacctctactaaaaatacaaaaattagccaggcatggtttcagatgtctgtgacaccagcttctgaggatggagactgaggcatgagaattgcttgaacccgggaggtaaaggttgcagtgatttgagatcgtgccactgcactccagtctgggcaacacagtgagactccatccccaccctcaaaaaaaaaaaacgttgtgtagaggagggcttttgtcatgttgcccaggttggtctcaaacccctgggctgaaatgatcctcccactttggcctcccaaagtgttggggttaaaggcatgagttattgctcccttcaagaattttaaaatggcatcaaccaaagcacaatcaacttttttgaaataaagacagaactgcatttagaggaaaacattcaaagcttcaaattgttcatatgaaaaaaaaaaaggacaggatatagctctgtgccatcgtaggctgtactgtcaccaccccagaccgactgactgtaggtcagatgggagtgtccttacagaaattagtgacttaccagatctggatgtagtctagaaggtgctcagtcctcaggaagaaccaagcaggaactctaggcttgaagactttgggtctctcctgtgggtctttagaagcttttattgacctttctaatcacaactcccacccacgcccctgcacatatccgctgcgaccttccaatcaaaaaatgatatctgattgcatttgtgaagctccacccagttaatcctgattgggtttttggctctccccagattaccggattgaatcagatgtccattcatatcacatatctatattcacttcatgaagcaagaaatcgacagtgttagggatagggtagaagtcaagaatacattcattcaaggccagacgaagtggctcacacctgtaatcccagcactctgggacgcagaggtaggtggattatctgaggtcaggagtttgagacaagcctggccaacatggtaaaaccctacctctactaaaattacaaaaattagccagttgcggtggtctgcgcctatagtccaagctactagggaggctgagacaggaagatcgcttgaacccaggaggcagaggttgcagtgagctgacaatacaccactgaactccagcctgggaaataggctagattcaaaaaaaaaaaaaaaaaaaaaaaaaaaaaaagaaaaagaaaaaggagagagagagagctagatttgattcgaatttacccagttaatcctgattggatttttggctttcttccagatttactgatggaattagatattcacccatcaaagtgaaagatttagggatggggtggaagcccaggactcattcactgattcccttcacaaacaaaatggggttttattaatatgtgtccttcacagtcctgagtgtgagatagggaagggttgaatctcttcctgatattagacagaaagaaaaaacttgaaagtatctttgttgagggatcctcggccacatcaaatttatcaaaatatttcagagttaaaacagttttcaaagacagagttgacagtccccaagaacacacaatagaaatcttcatgtatccaatgatcacctgggtggtataatctaattttttttggtgtgggggaagctgagtctcactttgtcgcccaggctggagtgcagcggcgccatctcagctcactgtaacctccacctctgagattcaagcaattctcatgcttcagccttccacgtagctgggattacaggcatgcacccccacacccatgtctccattcgagtggaagaattacagtgaggacgtgattggtttaaaattaaggtcatagatcctttttggttaagatattgtttttgttttttggacagggtctctctcttttgcccaggctggagtacagcagtggtgtgagcatggctcactgcagcctcaatcttctgggctcaagtgattctcccacaccagccacccaaatagctgggactacagatgcatgtcaccatgctcggctaattaaaataaaaaaaagtagaggccaagcaccagtgactcacagctgtaatcccagcactttgggaggccaaggcaggtggatcacttgaggtcaggtgttcgagaccaacctggccagcatggtgaaaccccacctctactaaaaatacaaaaattagccaggcatggtttcagatgtctgtgacaccagcttctgaggatggagactgaggcatgagaattgcttgaacccgggaggtaaaggttgcagtgatttgagatcgtgccactgcactccagtctgggcaacacagtgagactccatccccaccctcaaaaaaaaaaaaacgttgtgtagaggagggcttttgtcatgttgcccaggttggtctcaaacccctgggctgaaatgatcctcccactttggcctcccaaagtgttggggttaaagacatgagtcattgctcccttcacgaattttaaaatggcatcaaccaaagcacaatcaacttttttgaaataaagacagaactgcatttagaggaaaacattcaagcttcaaattgttcatatgaaaaaaaaaaggacaggatatagctctgtgccatcgtaggctgcactgtcaccatcccagaccgactgactgtaggtcagatgggagtgtccttacagaaattagtggcttaccagatctggatgtagtctagaaggtgctcagtcctcaggaagaaccaagcaggaactccaggcttgaagactttgggtctctcctgtgggtctttagaagcttttattgacctttctaatcacaactcccacccacgcccctgcacatatccgctgctaccttccaatcaaaaaatgatatctgattgcatttgtgaagctccacccagttaatcctgattgggtttttggctctccccagattaccggattgaatcagatgtccattcatatcacatatctatattcacttcatgaagcaagaaatcgacagtgttagggatagggtagaagtcaagaatacattcattcaagggtgggtgaggtggttcatagctgtaattccagcactttggaaggacaaggtgagtagatcacctgatgtcaggggttcaagacgagccaggtcaaaaaggtgaaaccctgtctctacaaaaatacaaaaatacaaaaattagctgggcatgatggcaggtgcctgaaacccagctacttgggaggctgaggcaggagaattgcttgaacccaggaggcaatggttgcagtgagccagaattgtgccactgcactccagtctgggtgacagagggacattctgtcaaaaaataaaaaaatcattcattcatgaactccacaaacactgatggtattttactaatatgtgaacttcatagtcttgagtgacaggcagggaaggatttgatctgttcccaacattagacagaaaaataaaatctgaaagtagtgttgttaggaaatctttggccacatcaaaatataaaaatgctttctactttaaaaagctttataaaaacagaggagtcgtccctaggaaatcagaataaaaatctcaacgtattgaatggtcttcgggattttgtataacctaaggtagcagattacatgctcgttctggtggaggagaggtgccactgagggcgtgagtggtctcagggcttaggttaagtcttctttggaagaaattgaagccacatcgataaactttataaatttaatcagtgaagaagggagggagagaaacaaaaataaaccaagcttggaacacattcagcattcatcaggaggtcttcttgctctctgacctggttcctcatggttgctggcaacctactgttccaaaatcatatagaccttagattacagttccccttaacttccctgcagacaaccatttaagcattgtaaaacattaactttttcatctgagatattctttcaggttctgcatgtcagtgaatctactgatgccagctgatctgaagggccctgcaatgcaccaactcaccaaagaatgcagtttctacatcctgttgacttcttccctcttaccgctaccccaactttccggccccttgctatccaggatccactggaaaccctcagtactccttggggagatgaatttgaggatctcctcctagcttctcattcagccaccttgtgatcattaaactctctgctgcaaaccctgctgtctcagaatattgctaagctactgtgcagcaggcataggaacctgatggtcctgtaataaagtcatgtcaaaattacaaatggaagtgagggtggagctggtcagggttgagctgggtttttaatgggaacctgggagtgaaccaagacttgctgaacatgttgggggttatcgagtgggtgtaagaggaatctatctaacattgcactgatgcccttttggttttaatcctcatgaccaagtatgagtctttcaaaacaatttgtataatcctccttatttttcctttcaaaaccttcaacttcctttatctccccaaataatctcacatctattcccatttctttgcttactacataataaacattttttttacagagtcttcttctctgttaagtagaccacatatgttgttgccacacaagatgagcaacctggttctatggacagaaagggtcaaaaggatcccattcctcaacagctgggggtgatgtaaaggtcatggttattctttgtcatatctgcacctgcatattgccagtgaaaacttgcaggttacattgggcaggcttccaaattcaccacctgtggaaggtcttttgcttggcttacatcctgtccctgagtaaagaatctcatggtgagttcatgagtgcctcaaactctgcaagtattgatgaaggcttccacccactgacagtgagaaggcactgatttgcttctgatcatgaagttttgctggttgtcttgcaaggaatatgttttattcttttatcttgtcatctaaagccaatgattgtaacctctgtattgtctcttccaatggaaaaaacgaaaacaaaaactcaactctatttgagccttgtcaggtcaataaaacaaaagaaaatttaaaaaaataattgataggaggagtcccattcccagcctgggcaatagagtgagactccatctcaaaagaaaaaaaaaaaaaggccgggcacggtggtggctcacacctgttatcccagcacttcaggaggccaaggcaggtagatcccgatgccaaaaaattgagaccatcctagccaacatggtgaaaccctgtctctgctaaaaatacaaaaattagctgagcatggtggcgcccacccatagtcctagctactcgagagactgaggcaggagagtcgcttgatctcaggaggaggaggttgcagtcagccaagatttcaccactgtactccaacttggtgacagagcgagactccatctcaaaacaaacaaacaaggaaacaaacacaaatgaacaaacaaaggaaaaagctggaaaaataaattctgaaagaatttccatctctatgaattcatcttcagaagtgatagcatttcctgcttggcatttttcgcctacatttttggcataagatctatcaacaaaaaagtatgaacccaggtttgtgtaatggaatatcttaaacatcaataggaggagtcaatagttctgatgccacacacacatatatggtcttctccatcatcagaaaatggcaacaaagtggtagagttatgcagagtgtagcatttgaaatggagatttgaaggtgacaaggaaaggattttgtaagacattagtgtacaagttgagcaatgttggttcctgtcacagtatttttagttatttttttatttattttattcatttattttttgagatggagtctcactgtgtcaccaggctggaatgcagtggcacgatctcagctcatttcaacctctgcctccccggttcaagcaattttcctgccttagcctcctaaatagccgggactacaggtacatgccactacacctggctaattttttgtatttttagtaaagacggggtttcaccatattaactaggatggtctcaatctcctgacttcgtggtctgcctgcctcggcctcccaaagtgctggattacaggcctcagccaccatgcctggtcggttcacatcaaaatttaagaggtattcaattgcatatgaaacttgtaggcaaaatttatttcttttttctttaaagcattaatttatttatttataatgtatttatttattaatttttttttgagatggagttttattcttgttttccaggctagagttcaatggtgcgatctcagctcactgcaacctctgcctcccggttcaagtgattctcctgcctcagtctcccagttagctggaattacaggcacaggccaccacacacagctagtttttgtatttttagtagagacagagtttcaccatgttgcccaggctggtctggaactcctgaccacaggtgatgcacccacctcggcctctgaaagtgctgagattacaggtgtgaaccaccgtgcccggcctacactcatcacttttaatactttctacatcacatgaggaagaagagcagaaacacttgagtacttcatgaaggtcaaggttggtatgagtttgggttctaatatgatcaatttctgcttctagggaaccaagcagctcaggttaaggaaggtcaggaaactctagggttttctctcccttcaaagaaagctttacgtatcaccttaatggagaaagcaaatctcatccccatgttgtcacctaataaaaagccatactttcctaaaaatggtccaaatgtcatttggactgctttgaacacaggaattttctgagcttcatgtgaagctttcagtgaatttcatgtgaattcactcctggtccaatgaagccatttcctggcatggccaaagatcaggaacggattcctctggatctgtccattaggagtgagcagggtctcagtatctggggagcagtgagggcccctgagaagagggtaggtttcagtggctcatcatcactgcccacacagaatgttccaggccccaagtgtgcatcctttgtgaatgaacccagtgaacaggcatgggagaaattaaggaagaaacagatgactgaaaggaagcaaaaaatgagtgagaactaatcaaaatgatcacatttcagttttgatgccttgatttgctgcagctgaacctcaatcacagatgacgtagtacctctcatcagtaactagagatttctgatatataaatggctaaaacaggttgatcaatcatggaagacaccagaaagtttccattcaggttccatttatttttgacatttttaaataaccatccttgcgagggtaactcctgcatcattctagaacttcaggttccatttccgagtctaggaaacaggtccctgaaggctttattgatgccaagtcagcattttcaccaagtcctgcccccagctgagtcacctttgtttttccactcacagtcagcacgtgcctgaaacacatgaccgtgtgcttcctttaagatgcacctgaccgggccaggctgctcatgcctgtaaacccggcactgtggaagtccaaggtagtcagatcacttgaggtcaggagtttgaggccagcctcctccaacatcgtgaaaccctgtctctactaaaaatacaaaaattacactttgggaggccgaggcgggtggatcacgaggtcaggagatcgagaccatcttggctaacttggtgaaaccctgactctactaaaaataccaaaaattagctgggtgtggtggtgggcacctgtagtcccagctactctgaaggctgaggcaggagaatggcgtgaaccctggaggcggaggttgcagtgagccgaaatcgtgccagtgcactccagcctgggtgacagagcgagactctgtctcaaaaaaaaaagaaaaaaaatacaaaattagctggatgtggtggtgcatgccagtaacaccagctactagggaggctgaggcaggagaatcacttgaacctgggaggtggaagttgcagtgagctgagattgtgccagtgcacttcagcctgagggacagagtgagactccatcaaaaaaaaaaagcacctgtgtcctagattttagtgcccaagggtccagaagaaaacgtgtccatcccactagccaggccttccctaagagcaaagatggaggtccactttctcagatggccatgagccacaggaagggcaggggacgggaccaaaaaagatcctcttgggctgcctgacttccctgagtgtacacatcagctcagcccgaattggggcaaggatctcccaattggcatgacccctgttgtcaagactctccagacgggaaggatacaactccaggcctaacttgctcagcccacctgtgtgacacagaaggtctttcagagcattcatggaagtctcgtttccttgaaagtagaaggtggtgagctgggagcagtggctcagggcaggcaggaggaccctgagttgggagtcctggatctgacagtcctttaacgtgagggtctcaagagtagcagcaactttctctagcagaactccaaggggctcaagattggtggtccacattaggatatgaatcagatgcagctcctttagctgactgaggcttgggtactgagacagacactccatgtcccgatcagctaggtaagcatgacagaatataaaggcccccaagaggttcttgaggcacctggggagagcaagaaattagttatgggcaatggtgccagttagaggagaggggtgggaaatcatctcaatggtaaacttgaagtgggcattgagtaattctgcaccttactaccacacaggtgttatagtaactgcaatggggaagcctgtttcacccaaacacaagtttgttcccatcatcagatgatggtctgtgtgcaaggtgctgcctgatgaagactcagatcattcaggggcagctccattttaggctcagtcctttcagccttgcttgtgtgattggttcaaggccacaaaatctttaaagcctctttactgcatctttcagcagacaacctcatctctgggccagaggagcccagtgggagatgtgcacaaagaactcaactgagcaaggtctagggacatcagctagggccacctgcctgcaaaggttccctgacgtgcccgcgtctgcaaaccacctatcactttataccactctcctgcctactccctcacctctgtccaagaagcatgcttttctcatgtcaactacttttcctggggttcaaaagaaccttttacagacagagaattagaggcaggatcattggtgtttactaagctgtgaggacggagcttctactgtgaaacgcacaggtttgatgcactttcccttctttcatactctcctctatatgaagagtaagtttcatcatattaacttcaaacgcacttcctaaaaaggaattcacaaatgcaccctccctagatctgaacccctgactaactagatccctgcatgtctctctctgtagcatctggcccgggccatccctctgcccttatttgagcgggtttgtgatacccacttcaggatatagagcactgaacagcataatgagttgacattctagcgtcccattccctgtgacatcaccagtggctggcacacagtagatgcccactagcgtttactgtgaaaaagaacaaaagtctgtggtatggtccgcagagaaagctcaccatcctttcttacctgagcaggtgctccaggtctttgatattattgacctttcttatataaagcatctgagggtaggacaggcagaggaatggacagtccaagtcaggaacgaactattgttggccgcttacatataactcactgtcataaccgaaggctaaaaagagtttgcgaagattgctcatctggctcaggtaaggggcaaactttcctgttttattcagagagcactttctcctaacttccaactgctagatactgtctgggtatacccttttcaataaatttctgaaacttgaagtgggcattgagtaattctgcaccttattacagcacaggtgcactagacctcttctgtagtggatctacccacaaaggtagctcaggcattcatccagtgtacttttctttaggcagcggtctatgaacaccttcaagggctggcactctcccatccttggacagtcctccactgtctgccttttactcatggcctctggggagcaggagaggaccttggctccagaccatatggtccagaaattcccatcaacatcccgcaaatccagcacttgaagtttccacctcctgtgagtaacacaggggaaaagctcagaatgtaggcaaggacccacccctgacctgagctttcactccacatccaggacatcagtcagctgctcctgtcctcagtgctcctccttctgtctcttctccatcccgctcccccttgggttctgcctggttctcacttctagaatctttacgttccactgggagaaagcaggttcctgtttcctcagtggaccctgtatggtgagcagtcctttcccagaggatctgggcaatggtcaaggcctctcatgggcaccatcagaagcctctgagccaccctagctccccaaccccaccactcctcctgagccagctgtcccttccctggatgcctggacccttcccaccaggccacctgagtcacctcacctgaggcaaaccttctgggccagcagtgtatcaagtcccttcagcacagcttgcaaggtctccagatgaggtgtcttcatcagggatcccagagggaggtggaggaaggaccaggcctgcaccatcagcttcagggcctcacagcgtctcctgctgacggcctccatgaacatcagagggaagacctccctgggcagctcgtccaggatgaagatggtcaagaactggttcctcagtaggctctgccctgccagctccaggagtctggatggggactggaggctcattctgacaaatctgcaaggaaaaactctagaggacaatccagtgaaaaggcaagtttctcaggccaatcccctgcaatccccgcttctcctagggccaaagtcatttctctagcatgtgtgaaagagccctcagtttactccaattccattctgcaataagtggccacagaggcatagttctgcccttctggtactaagaagagtgtgtcccaacctctaaagagcaggcaagatccctcctatagggtccatgaattattagccactgcactactacactgatagcactgggaagtgttagcaaggatctttgaagctcagatctccacttttttgagaaaacaaaatgtcttcttggccaggcacggtggctcatgcctgtaatcccagcactttaggagcccaaggtgggcggatcatgaggtcaggagatcgagaccagcccggccaacatggtgaaataccatctgtaccgatacaaaatattagctgggtgtggtggtccctgcctgtaatcccagctacttgggaagctgaggcaggagaatctctcaacccgaggtccagagtttgcagtgagccaaaatctagccactgcattccagcctgggtggcagagtgagactctgtctcaaaaaaaaaaaaaaaaaaaaaaaaagtaaagggaagccaagcatggcggcttacagctgtaatcccaacactttgggaagccaaggcagaacaatcacttgagcccaggagttccagaccagccagggcaacatagtgatagcccatgtctactagactctactagaatattaagtaattatctgagcattgtggcacatgcctatagtctcagctactctgcacatggaggtgggaggatggcttgagcctgggaagcagaggtttcagttatctgagattttgccaccacactccagcctgggcaacagagaaagaccctgtctcaagtaataataataataataataataataataataataataataataacaacacactttgggattgagtctaggggaagaaatggatcctacattcaaaacaaagactctactcttgaaaatagtgtatggggccagacatggtggctcatgcctgtaatcccaagactttaggagacaaggtggggggtttgcttgagtccaggtgttccagaccagcctggctaacaaagcgagaccccatcattataaaaaaatttaatagaacatagtggaaggaatatc

SEQ ID NO: 36 - DNA, 200002 bp, Homo sapiens
acctaattctgttgtattcataatcctccttcctctgattgatctttatcccagtaacaatgatgataataataaattgataatataagggatactatttattgagaatctattactatattaaatgatttgcctgcaatctcccatttaatcctgacaactatcttatatggtaaatataaattcattcattgaacaaatatttaccaagtgcttaccatgcactatgtactgttatctcatttttaacttctgataccaggctaagagaggtcaaggaatttcctaggattatgcattgacagggtaaaaatttaaatctgagtctgtgctctttccactatgcctgaaatggaggagttgtttctctttttaattgacagataaaattgtatgcatatactgtgtatgacatattgttttgaagtatatatacattgcagaatgtcagataaaggagtcttgactttgcagttcttttcataaagaaagagcagaacatagctaatacttgttcaagaaaatttcaaataaatgccatcttctgtaaatgtaggcattctaattcatggccaatcattcaagtaatctttcctcctctccactgaataaatgtttctctctctgtcatctgaagagctgcatggagagtccctggttatgataaatgcagactgttaaccacacccttatgcattcctcatgaaaagcaagacagacatttgacaagaaataaccccgactcttccatttggtggacttcagattacgaggttaggggaatgagaaaaactttcaatgaaagtacctactgggttcacagctgagtagtaggcccaagcccgacaggcagagccaggactttctggccctgatcgctcagtggcatgccatacgtaggtataactgctatttggctgaacagcattatcttccttaaaccattcaggagagtcatcttcataagtctttccctctgatgatttttcataggaaagtccatgggcatgtagagaatacggtctggatgctaaatttttaaaacgaacctaggaaaaggaatgatccacaaatgtacttaagcttaacaaaaatctaaaccacaaaaatgtcagcattataagtcaaaatggctggttataaaatcggagctaagatataaggtacaaaataacttatgtatattatttcatttaattttcataaccatcctgtgagatatggcccaagtagttttctccagaaataccaaaagatatttgttcttaggctcaaggctaaagtactgacattatctactaatgaaatgagagtgataggtagtggagatgtgaagatgaaagaagcttgattcttgttcataagaagcttttaagctcctgctgaaacagacatgcacatgggcatccacactacaaatctggagacaacaggtgctatatacaaagtctaagtgggttcagatgacaatgccctggaggaacaatttggttgaatatttaggagtggttggaagaattaaggtaagtttcttagaggaaatggaattggccatcatagaatgaacaggagctagaaagacatttcagactctcagaagggcagaaggatgcctgtgagcaggggagtaaaggaagagtttggggaatagcaaggatctcggtggaactgggctgtgaaatgcacagggacaggtggaacctggtgagaaatgaggctagaaaaggagcaggttggggccagatggtaaaggacttaaatgccatatgagaagtcttcacaccccagcagtcagacccatgaagctcctcccagcccttctataacttctagtgattaaagactccctaattgtctgttccttattttattctacaaagccagcatcaccctaataacaaaacctggcaaagacacaatgaataatgaaaactaccggccaatatctctgatgtacatagacacaaaaatcttcaacaaaatattggcaaaccaaatccagcagcaaattaaaaattaattcatcacaatcacataggcttcattcctaggatgcaaagtggctccacatatgcaaatcaataaatgtgattcaccacataaaccgcattaaaaacaaaaacagtatcatcatctcaataaatgtggaaaaagcttttgataaaacctaacatcccttcatgataaaaaccctcaacaaactaggcattgaaggaacatacttcaaactaataggagccatctatgacaaacctacagccaacatcatactgaatgagcaaaagctgaaagccttccccgtgagaactggaacaagacatggatgcccaatctcatcactcttattcaacatagtactggaaattctagtcacagcaatcaagcaagagaaagaaataaaaggcaaccaaagaagaaaagaagttaaagtatctctcttcattggcaatatgattctgtacctagaaaaccctaaagactccatgaaaaggctccaggaactgataaatgacttcagtaaagtttcaggatgcaagattaatgtacaaaatcaattatacaaaataaaatgtacaaatgtacaaaatagcatttctatacatcagtaatgttcaaactgagagcgaaatcaagaacgaaatcccattaaacatagccacacacacatacaaaatacctaggaaaacatctaaccaaagaggtgaaagatctctataagaagaattacaaaacactgatgaaagaaatcatagatgacacaaacaaatggaaaaacattctatgcttatgtattggaagaatcagtattgttaaaatagccattgtgcccaaagcaatctacagattcaacactattttttaacaactactggaatcattttcctcaggattagacaaagctattctaaaattcatatggaatcaaaaaagagcctgaatagccaaagcaatcctaagcaaaaagaacaaatctggaggtatcacagtacctgacttgaaactatactataaagttacaataaccaaaatagcatggtactgatacaaaaacagacacataggccaatgaaacagaataaagaacccagaaataaagccacacacttacaaccacctgaactttgacaaagtcaacaacaacagcaacaacaacaacaaaaaacaaggggaaaaggactcatatttaataaatggtgctggaatagccggctacccatatgtggaagaatgaaactgaaccccaatgaatccaatgaaactggattcatcatatacaaaaattaactcaaaatggattaaagatttaaatgtcagacctcaaactataagaatcctagaagaaaaacctaggaaacaccattctggatatcagccttgggaaagaatttatgactaattcctcaaaagcatttcaacaaaagcaaaaattgacaaattaaactaaagagcttctgctcagcaaaagaagctatctacagagtgaacagacacagaatagaaaaaatattcacaaagtatgtatctgacaaaggtctaatatccagaaactataagatagttaaacaattgaacaagcgaaatacaaataaccccattaaaaagtgggcaaaagacatgaacagatacttatcaaaagaagacatacaaatagccaacaaatgtgaaaaaaatgctcaacatcactaatcatcagagaaatgcaaatcaataccacagtgaaataccatctcacaccagtcagaatggctattagtacaaagtcaaaaaatagatgctggtgaggctgtgaagaaaagggaatgcttatacactgctgcttagaatgtaaattagccactgtggaaagaagtttgggggtttctcaaagaatttgaaacagaactactattttaagggaggagaccacccctcatattgtcttatgcccaatttctgcctccaaagaaagaagaagtaaaaactaaaaggcagaaatgaaatccacaagcagacagcccggcgccacaccctggacctggtagttaaagatcgacccgtgacctaatcggttatgttatctatagattacagacattgtatagaaaagcactgtgaaaatccctgtcctgttctgttctgttctaattactggtgcatgcagcccccagtcacgtaccccctccttgctcaatcaatcacgacccactcacgtggaccctcttagagttgtgagcccttaaaagggacaggaattgctcactcggggagctcggttgttggagacatgagtcttgccaaagctcccggctgaataaagcccttccttctttaacttggtgtctgaggggtttttgtctgtggcttgtcctgctacaatttgacctagcaattctattactgggtatatagccaaaaaagaaaataaattgttcagccgggcgcaatggctcatgcctgtaatcccagcactttgggaagctgaggcaggcagattgcccgaggtcaggagtttgagaccagcctggccaacatggtaaaaccctgtctctactaaaaatacaaaaattagctgggcatggtggtgggtgcctgtaatcccagctactcgggaggctgaggcaggagaattgcttgaacctgggaggcagaggttgcagtgagttgagatcatacctctgtactccagcctgggcgacagagtgagactccatctcaaaaaaaaaaaaaagaaagaaagacagaaaatacattgttctactgaaaagacacatgtactaggatgttcatcacagcattattcacagtagcaaagacatggaatcaatctaggtgcccatcagtggtggactacataaagaaaatatggtacatatgcaccatggaatactacgcagccataacaaagactgaaatcacgtcctttgcaacaacatggatgccagctggaggctattatgctaagtgaattaatgcagaaacagaaagccaaataccacatgttctcacttataagtgggagctaaacattgggtactcatgaacataaagatggcaataaacactggggacttctagaagggggaaggaaggagatgagcaagggatgaaaaactattgggtactatgcacgctacttggatgatgggatcaatcataccctaaacaacagcatcacataatatacccagataacaaaactgcacatatgccccctgaatctaaaataaaagttaaaattattttaaaaatacacaaatgaagtcatttttatctagtgaaatccagggctaaaacaaagattcagtatttgatttttttccttttgcctaaggctccagtatgtctcaatgcaacattgttacttatcctgtctttattcacaattgtgaggttttgtttattgtggctttcgtgcattaattttgatttttaaattttttaaaaaacttcagttgctttaggaatgcaagtggtttttggttacatggatgaattgtatagtggtgaagtctaggattttagtgtacctgtcacctgagtagtgtaccctgtacccaataggtagcttttcatccatcccccgttcccttttgagtctccaatgtccattataccaatctgtctgccttcgcatacccgcagtttatctcccatttgtaagtgagaacatacagtgtctggtttttgattcctgagttacttagaataagttttttaaatattgtgttaaattatcgttcatcttgaaaaaggatcccctaatcataaaagagaatattgcctcccatagcttcatggaaaatttagaataattaagattcttatatccctatgtacttgtttacgtttttaaaaagagcaaatggtcactgaaaatgtagtgaatgcttacacaggtatagtagattatattttaaaatctagaatagcttactttagaatcagggttctttctgggtttttgaatgtgagcggttagcaaaaatggcggaagtaaactttgttataaaagcaagttataatcgtgggtctggacacaagattttgaaagaaattaccagaactaggaagacactgaagaaacttgctcacttttggagggcatggagacatctttactttccttactcattttatttaacttcattttatttaatttttaggaaaacacctgaagatatttctaaattactattactactagcactgctactgccaccaccaccaccactgctatgaaacccaattcaattgctcttgaatatattaattttctgtgttaactttagataggttagctttagatagaaattacagaaagattttccacagattatatagttttcagcatttaaaaaatgagatcttttttttttttagttcgaagattgccaaattgcttggcaaggagtctttgaaaagaaatgtaattattcattaatcctggaaaacaaacaaatcacctatagctctcttgccacctgcacctttacaaccctctggtgcttgtggaaattcctccgaagatcttagcagtgctcaaaagacttacttggataacatcatccacttcagctctgataataggaccaagaattccgagatgctcttcatactcccctcgaggatcacgtttggtaaaagtgctgtcgaggtactttcgaaaaactactttcttatatgtggtatcttctggaatatcatcagagtcttcaatatctgtttccctgaaataataatactatttgtgtaaaagaagaaattaaagactgttcccagaatttaggaaattgtctctttctaaatatagcatctagcatagagaaggtctttaataaatacttggtggataaatgagtaaatatataagtggataaaaacaaaagccagtaaatatctttcaattcctaactcaaatattattttataggtaagtcttcctatgaccttttagactaggtcaagtctctatatcaatttctcatatttctatagtattattatagtatatatagtaaattcctgtagtattcttataatatctctagaatatatattgtagattatatataatttatttgtgagattatctattaatatctgtctctcactgggtataagtgccatgaggtcagccattgtgcctagtttgctcatagtactctctccagtggtaagcacattatctgacacacagcaggaacttaataaatttttgtcaaacatataaatgaatgtataaatataatcgtatgttaacacaccaaattttaagatcaaaggcagacaaagccatgtaatgggacagtgccagagcttggggctatcaggtgacaatggtcagattaattagaaggtcacacttatgaaagtcactggatgggtgaatgttttgtaccctaaaagtagccactcttctcacatttgttttttgctaatgtccattattcttaagcttcttgacattggtgtggacaaagattttttggatttgacctcgaaagtacaggcaacaaaagcagaaatagacaaatgggattgccatcaaactcaaaagtttatgcacagcaaaggaaataacagagtgaagagacaacctttggaatgggagaatattcttgaaaaccagatatctgataagaatattaatattaaaaatataaggaactcaattcagcaaaaaacccaaatagcctgattaaaaaatgagcaaaagacttgaatagacatttcgtaaaagaagacatacaaatgaccaacaaatatatgaaaagatgctcaacattactaataatcagagaaatgcaatttaaaatcacaatgagggctcacctcacaccgttaggatggctattataaaaatgacaagagataaatgttggcatggatgtgaagaaaagggaactcttgtatactcttggtgagagtgtaaattagtacagccattatggaaaacagtatgggaggttcctttaaaaattaaaaatagaattaccacatgatccatcaatcccacttttgggtatatacccaaagaaaatgaaatcagtatgttgaagagatatctgctgtcccacgttcactgcagcattagccacattagccaagatagggaagcaacccaaatgtctataaacaaatgaatggatttcttaaatgtgatctacataaacaatgaaatactatttagcatttaaaaaaaagaaaacgaagaaatgccatttgtgacaacatgactgaaccaggaggtcgttatgttacataaaataagccaggcacagaaagacaagtactgcaggatctcacttataatgtggaaactaaaaacattgagctcatagaagcagaaggtagaacagtggttaacaaagggatacagaggtggagcattgagaaaatggtcaaaagataaaattcagttagaagaaataaatttagaagatctgttgtataagatggtgactgtagttaataacaacacactgaatttttaacattgctgagtacattttaagtgttctaaccacaaaaaagtatgtgaggtaatgcataggttaattagcttgatttagccaattcacaatttataaatatattaaaacatcatgtttacaccataaatgtgtataaaacaacaacaacaaaaaaactggggtacacccatataatggaatacatgcaataaccagatgaatctccagagaattatactgagtgaaaaaataccagtccccaaaggttacatgttgcctgattccatttatgtaatattcttgaaatgacaaaattatagaaatggagatcagactactggttgccagggaataaggaagggctatggtgggaggaaggcagatgtgactataaaggggtaatgagagggatttttatggtgatggtgaacattctgtgtcttgacagtatcaacatcagtgtgctggttgtgatatagtattatagatttgcaaaatgttacccctgggagaaactgggtaaagaatactcaggatacccaaaggatctctccgtattatttctcttgactgtatgtgaatctattttatttttgttccaaaataaaaagtttaattacaaattataaataaataaataaagcacattatttccatctagttcattggctcagtctaggactgaagcatgtcgaattctcccactgactctcacatttcccaagcctgtggaaacaagccaaacactcacccatcaaacccataatatttgctatatactgtgagtcatcaacagagaatctccttctgcctttcttctggtctacctcccctactaatcccatctttccagactctgagcataacatgcaaactcacagaacacaagggagtgggtaaagcaactccgaatgccataaaagtgggttgtgagccttgaatggaatacaagattttgaaggtggttccatccctattcactctggacaggccctgcatctcactccctcggggccttgcttagaaatactcaggtagctagttgttctcatgtggtattgagtgcaacatttaaataggaagtcataggaaaaggtgttttaaacagagttctaatgtggagatgtcaggcatcagattaatgaactcatatgcataagtcacaccatacattgtgtttgcctactgtaattacactttggttttttaagtgattagtgtaacagctttagtaaaagctgtgggcatatctagacagctgatgcacagtcatcatgctatatccctgagaatttgtagttgactaagccttgctcctttcctcctctctcttctctttctgtatcttcatcccagaacaaagagcccagttcaacatggctttctacccctaagcaaaactgaattgtaaatattcttttaaaaaagggatttggatctcttagaaattctgatctaaacaagtaaatgcaaaaaggagatttctacatcatatttgagtttggatttgaggctaacttcaattaaatcatattgattagcatatagctatggataggttgggctctgcctggagcaataagagtcagtagaaacatgggtagtaagaggagaggacacagaaaaatgcttaattacagaatattatagagttctcacagtgattgttcttatattgtccaggggtcatctaaggtaaagaagcaatcttggaattgacaaaggaaaaagaacaggccaacttgcaataggggaaccacactgttcttagtataatttgcccacaattatccccctgaattgtagtagctacttttttcagcagtaatggaaaaatgagaataaaaaaggagaaaactggccaaacctttgtacaaattctgaataatcccaggatatttcttcagcagcaatgtaataatttcttctgtttccattgttgctgcggaggtaccatgctgcaatgttgtcaggatctctggaggagttgatgtttgtcctaacatcagttttgtaggggtcatcatagggcacataatcaatttcagcatagtcatcttcactgctctggacctcttcctttggaatgatctcaatgtaatctgtaccatctttactgaggcccactataaccagtggattaaattcctttgatagaaaagtatcattgagagtaggagatgaaggagatggcatctgaccaaggtctggataaggaaaagactcattaaattcttgaagaagcaatgactgactagattcagaagggtagaatatctgatcaaggtctggaggaggtgatatctggctgagatccgggagaagggtggtgtcactgatgtctggagagagagtcacctggctgaggtctggggaaagggacatctgaccaaagtttggggaaagatctgtctcaccaaggtctggagaaagtgtcatctggtcgaggtctggggtaaggggaatttgactgagatctgcaaagaggggcatctcactgaggtctggggaaaggtttgtctgactgagttctggagagaggtttgtctggctgaggtctagagaaagggttgtatggctggggtctggagaaaggggcatctgaccgagggctggggaaaggtttgtttgactgagttctggagagaggtttgtctggctgaagtctagagaaagggttgtatggctgaggtctggagaaatgggcatctgaccgagggctggggaaaggtttgtctgactgagttctggagagagagtcatatggctgagttctggagagaggtttgtctggctgaagtctagagaaagggttgtatggctgaggtctggagaaaggggcatctgaccgagggctggagaaaggtttgtctgactgagttctggagagaggtttgtctggctgaggtctaaagaaagggttgtatggctgaggtctggagaaagggttgtatggctgaggtctggagaaatgggcatctgaccgagggctggggaaaggtttctctgaatgagttctggagagagagtcgtgtggctgaggtctggagagaggtttgtctggctgagttctggagagagggtcacctggctgaggtctggagagatgactgtctgccagacttcatgttctgaggaaggggacatttgacttatatctgtggggaaggacttgtgacttcggtcatactcaagcatttcactgagctctggagaagaggatctgtgactggggtctgaagtagagtgcatttgatcagggtcttgaatggggaatgtttgatagtgttcctctgggggcactgtctgataaagacctggaggacagcttgcctgaccagtgtcatttgaggaattctgattatggtcaggaagtgaggctatccagccaaaatccatagagggcaatgtctgattgaggtctgtgggaagagatgtttcattggatttatgaagcaccaacgaatgcttaagtcttctttctgaaaatgtgttgtaggcttcacttcttagagggtgaaaggtcctcggagataaaggagcatggtgtgtgtgcttctcttttttcttttttcgtgtcttaatgagaaactggcttttcttcagtctactctttcctccatcctgtcttacttgtagagatttatgtctaactctaggaaactttgggtggccactctgctttccaggcttgttggcaagaggggtgctttctccccaagcacgtgaggcattctgggggctgatcagccaattgttaacagctgtgtcttcatcagtatcttggattatttcatagctacctttctcagaagccaaatgccatctcccaaccaaaatcttagatgagttactttgttttaagagtaacagatcactaggagggtccttccagggcctcattctggaaggagaaccagtgtcttggctaggaaggtcctcccagggcctcattccggaaggagaaccagtgtcttggcttaggtgtctcccaactttatgtgctagtaatttcatccaggagaacctgtgctttgctgcttgatctctttctaccttgggtcccttatgcttagcatgttcttgacttttgaattctccagcaccaagtgaaagtagacgtatccctgtgacatctggctgtagaggatcctctatagggtcttcagaatatgggctggaatgctctgctgtggaagaattgagaactgagttcttgccaatgaggtgtctcagtggggaaccagctgtggtggcttgttggtgagaaggggctttctgaggttctgcaaggttattgacagtgaacttactaatattacttggggaagaataatttgaaccaacaattatatctgtgtttgaagaaacgaattcagtgccattctccagagctagggcagtaagattgaactcttcttcttcctgattcaatgatgagtttcggaatgacctgattcctaatgctgcagccagtctgttctggtaatcatagtcagcatcactctcttcatcttcaggttctaaacgatcatgcattttccgtgtagccatgactgtagattctggaggttcaaaaatctcatatgagtcttcatcatcatctgggatacatttaacatccctgaatttcagcctcagctttttgcttcttggactagaattcatggaagttaacatccaagttcctacagaagagagacagacagaagagagatctggaagtctgggaaaagacatgaaaacacaataatccattgtggcaggtaatttctaataaactttcgtcaggaatattcaagtatgggctgtggaccactgcttgtctgtgacctattgattactgggtcaaaataacacaaggagagaaaaatgagaatgaaatatttagtaaacttttgtttttctaaagcaatttgacattgctgtgactctaagcacatgaccagtgcgttcatctcgcttaacagaataaaaaacaaaagtgttgcttagtggagattagaggggaaaaaaggtctttcagcacagatagttgctcactattttaaaatatattaagaaagggatgaatcaagaataaaatggacttttaatatcataaatatcctaacagcacatcttgtcttagaattaaagggatggtgatgagctctatccccacaaataagagacatttagatgtttctaagtaataattcacgaggacaattttgaatctctgaaatggcatgcattgctggaacatcaaagatttcttggtgagtctccaatagttaccattgttggtgtctactgagtgctaggcacttggcgcatattactattttaatggtcaaagtaactctgtgagatgtgattacactgttttccagataaatgacttgtggctcagtgtggccaagtaacttgtgtaaggttacacagcaatcgattggcagatcaggacttgcattccagtctgacaaactccaaagctgttgctgaagcagcctttaaggcactgtacctgatgattgaagatgactgttgcaaaaaaccgaatagggcattttgataaaagaaatgctcttttgtggccaaaatatttatgcttcttcctcagagttatgccttatttttctgctgttgtatatttttacttcctactttgcccagagaaggaaaaatataacccacactaaagaactggatccatttaagtcattaatttctcaaagagaaatcatgagaaacattgaaagaaaagcctgcagggggtcagggagatacatagaggagcactggtagcctggagagttgcagcagacctttatagaccagaaattcaaagcaagcttcctctgtgagtgtccagactcttactcaccaacattatccattgtgaccgtcacagattctccacgcatggggaagagggtcaaggtgtcctcatgcctctttccatagatgaatgagtgcccagtgaagtggatggtcaaaatttcattctgggtccccacactacagaagtgccactggacagtgtcatcaaagcagaatccaagagtagttatgctctcaggcacatagccattgatagctgaaagtgtaaaatctgttaaaattccaagtctatgccaacaaaagggcatgtgtctaattatacctaagataaatgtctccatgttaatttggttgtgtcaaagcagtgattatccaagataagctttatctagtctaacatgtgactagaagatcaaactcagaattttcaaatgagagattattctcctaaattagccaaaggagaaatctcaggaaaaagataaagccttccatttacattgatttagtcattcatcaaatgtatagtaaatattttgtgctccattctctgcctttaaagatattctaataattccacttggaggaaaagcataatataagaaattcatctttttgatatattagtcattgggtaagaagtaatgtccctaaaaataaagcccatttagcatattttatagtttttattgctgtcttataatctacatagtattcacagtttccatttgagtatccagttcatacatttcattattgttaaaagggacactgctgtaggcaatatttttatttacttatgtactaagcatagtaaaaaaccaaaggtatgatttctacaagggcagggctcatgtctacctcgattaccactcttagccttagtaccagtataatgactggcattaacaaatatttaaatacctacttaaatcacttaagtgactttaataatttacatgatgtattattagtttatacctcattctagatgtttttctaaatggtctataactgcattgttcaatatggtagccactggctacaagtggttatcgagcacttgaaatatgggtagactggactgagatatgctgtgagtataaaatatacattgaatttcaaagacttagtaataaagtaagtctcattaatttttatattggttacatgttgaaatgataatattcaggatatactgagttaagtaaaacatattactaaaattaatgtcacctatttctctttactttttaatgttgctatcagaaaattttaaattacgcatgtagctcatacgtagtttctattggacagcactggtctagaactatgatagattcactgccaaaaggaagttatgcaaagaaagctgagagtaattttctgtttgaattatttgacctggcacctgtcagctctgataatccctagctgtcagtcatctgaagctatatgaacagaacatgcagaaatcatcctcacatgtgtgattacctactagagaaggtgattaccatgactctagactctgaggatcagtagggggaccctggctgttgtggagaagtttgcttccagctggctcagtgacatttctctcagactgccatggcagtgcttttggccactgaactttagaactgcagcaaatgccggaaccctcattcagggaattccttttgttctgaaaatcttactgatcacttgaaatgtcttcatgcatgcctttccaagactcttgggtccctatactcattttgctctactttgatgtgtcaatccatctttggattacttgccttctttctgtcctagccatatattcaccctgaactcagtctaggatactattgacatggactataacaccttccattagtcctactctctcacccttttcctcaccacgcagagtatgtctgtgtacacacacacacacacacacacacacacgcttggaatagaagatcaaacgcatttctaaggatgtgagcctttgacctcttgcttaaaaatgttgctatgatgtcacccacggatttcatcaccaagtctttggactggaagtgaggattggaggtgccccttagcgagtagattttaatccatgtctctgactctaggcacagtcatatttcaaccacaggaatgaaaaactgatgaacaaaaatagtactctgacttactgctcatgatgtttgattcataaaacttggggtcatcacgtttcacctcatcaggattttcacaaaacttgttgatgttgtcctcaaggtaccagcttttgttctcatcaaacacagcaaacacagcctgctgttcgatgtctgctgccctctggaggacaaaacagtatagtactggtacaagaacagacgcatagaccaatggaacagaatagagaactcagaaataaggctgcgcacctacaactatctgatctgtgacaaaagcaagcaatagggaaaggattctctattccataaatggttctgggaaaactggctagccgtaggcagaaaattgaaactggacccctttcttacatcatatacaaaaattaactcaagatggattaaagacttaaatgtaggcctggcgcggtggctcacgcctgtaataccagcactttgggaggccaaggcgggtggatcacctgaggtcaggagttgaagaccagtctggtcaacatggcaaaacccgtctctactaaaaaaaaaaaaaaaaagaaaagaaaagaaaagaaaagaaaattagccaggcatcgtggcttatgcctgtaatcccagctactcgggaggccgaggggccgaggcaggagaatcacctgaacatgggaggcagaggttgcagtgagctgagatcgtaccactgcactccagcctgggcaacagaacgagactccatctcaaaaataacagaaacaaacaaacaaaaaacaacaacaacacacttaaacgtaaaaccccaaactacaaaaaccctggaagacaacctaggcaatattatttgggacatagggatgggcaaagctttcatgacgaacatgccaaaagcaatagcaacaaaagcaaaaattgtcaaatgggatttaattgaaataaagagctcctgcacagcaaaagaaactatcaagagagtaaacagacaacattcagaatgggagaaaatttttgcaaactatgcatctggcaaaggtctaatatggagcatttataaggaacttaaatttacaagaaaaaaacaaacagccccattaaaaagtaggccaaggacaggaacagacacttttcaaaagaagacacacatgtggccaaagagcatatgaaaaaaacgctcaacatcactgatcattagagaaatgcaaatcaaaaccacaatgagataccatctcgcaccaataagaatggctattattaaaaagtcaaaaactaacagatgttggcaaggttgtggagaaaaaggaacacttatacactcttggtgggagtgtaaattagttcaaccattgtggaagataccatggtgagtcctcaaagacctaaagtcagaaatacctttgaacccagcaattccattacttggtatgtacccaaaggaatataaatcattctgttataaagacacatgcatgcgtatgttcattttcgcactcttcacaatagcaaagacatgaaatcaacccaaatgcccatcaatgacagactggatgaagaaaatatggtacatatacaccatagaatactatgtgaccatcaaaaagaacaagattatgtcctttgcagggacatggatggagctggaggccattattctaagcaagttaacgcaagaacagaaaaccacatactgcatgttttcacttacaagtgaaagctaaattatgagaacacatggacacatagaagggaacaatacatactggggcctatcagaggatggagggtggaaagagggagaggatcagaaaaaataactaatggatactaggcttaatacctgggtgatgaagtagtaagtacaacagacctccatgacacatgtttacctatgtaacaaacctgcacatcctgcacataagtacccctgaacttaagagtaaaaaaaaaagaaaaaaaagtgctgtattcagtcattaacattgcagcaaattatctacaccactgagttctcagaaaccaaagtgacatagttcttggaactactgaagccatataattcaggcatttatgagagtccattgtgtacacagcacttgttagagctaaaggtaatatgcaaaagcaaacagaacagataagaaaattcagagattaaaatatcccaaaagagccgggcacagtggctcacacctgtaataccagcactttgggaggctgaggcaggtggaacaccttaggtcaggagttcgagaccagcctagccaacatggtgaaaccctgtctctactaaaaaatacaaaaattacatgggggtggtggcgggcgcctgtaatcccagctactcaagagactgaggcaggagaatcacttgaacccaggaggcagaggttgcagtgatctaaaatggtgccactgctctccagcctgggtgacagagtgagactctgtctcaaaagaaaaaaaaaaaaaaaacaaatcccaaaagaaaaatctcatttcgctatggcagctgaaagtctgtctatctctgtaattgcacacctttcaacatgaatgattgactgaatatgctctgaataagtgcaaaggatgaaagagaaggttgcaatagaaaagccttatgcttctactacctgtttcctttcctagctcaataaatcaggatcttccatatgtccagaaattcatttctgctttttctaggcatatgtttattttgtatgccttgagataagacctctttggttacagtttagcataattgggaattttagtttaataatatgagactacaattcttcaatgaagacaaactcagaaattcagtatctttgttcacattcttctgtatactttagtctcaacagagatgggccataatctgggtccaatttcactaggaactatgtctctaaatttggttgctttcagagaatctctcctctgtctccctattgcaggtctctaaaaatagcaaagactggtaaagagctttatacttttaccagatggtatctcactgaacccccaaacagacctgtaacatttttaggagggttattacccatttgataaaaggaagaaattaggaaaggctaatcaacttgctcaacacatccaataccaacagacctggaatttgaaactaagacaaaatatgttatcacactctagacttgccttcggcagtgatggtactgataaaaatagacaagacaaaaaaaaaaaaagaataaatgttatcacactggtgctaaaaaggactacttgacaattactgttctcttgaaggaaatgccccattatttagccaggagacctaacatgttctagccagaagaaattctcagaatttctgaaaggttacttcaaggacaaaatacctgtattccttgcctgtccagggatctgctcttacagattagaagtagtcctattagcccagaggcgatgtctctcatgatgtccacgtcactgtagtatggtcttgttaagcactgggcatcattttctgtgggttcatcaaactctaagatgttccacttataagtataggtttcccctggttgaactgctctgatcatggtgttgttcctgcctgaaagaaaatatattcaaaattgttttcatttgcaaagttatttcatgataataaataaataaataagctttcgctggaaccaattaatattgcaaaaggaattcttttatttttattttttttaaattatactttaagttctagggtacatgtgcacaacgtgcaggtttgttacatatgtatacatgtgtcatgttggtgtgctgcacccattaacttgtcattaacattaggtatatctcctaatgctatccctccccccgccccccaccccccccccccgacaggccccggtgtgtgatgttccccatcctgtgtctaaatgttctcattgttcaattgaattctttaaatattctacttggaacctggataacatgtagccattagataatgctccactagaggccactatgacactaataaaagacaccatattttgttaccactaagagacaaaactcctgaagtgagaagggtttggctgtgatttttaggatactcctacatgtatactacctgactgcagtagtgacaccaccgggcaaggagaatagcagaaaaatgtggcagcctctcagaagttactagttggattcagtagaagtgaaagattcaaacctgaggtgaaagaagagttgacttcatcttcataaggcgagaaggtcactccatgagggtaaatgctataggggcggctggccatatttttgaacacgatctacaaagttaaatcaaatttattctaggatttaaggttgatcatgacaaataatataagatactagctttgcatattcaccttttggatggtgtgtgtgtatacatgtgtacacacagtaggaaaattagatctgtttatctgagcagtaacctcccctcatcacttggcaggagcattggagagagtgtttcactcacacattaaggtggaaaatggaaagagaagtctgactttagaggataggttaggagaagtgacgttttcctcacagtatcactctctccaagcaagtcctccttcccctgcccttctcttttcagcttgggccacatctcattttgaatctgcttctcatctctagaccatgatccccttcccctgcccggtagattttttaggacactgtctttgaagtcatcttctcagctaggttcagtggctcaaacctgtaaccccagcactttgggaggctgaagcaggtggatcacttgagctcaggagttcaagaccagcctgggcaacatggtgaaacctcatctctacaaaaaaatacaaaaattagccaggcgttggggcgtgtgcctgtagtcccagctacttgagaggctgaggtgcgagaatcgcctgagcccaggaagtggaggttgcagtgagccatgatcacaccactgcactccagcctgggtgacagagtaagacccttggtgggggggaaaagctacttgcttgagaggcacagacaaatagccagatcctgaacttttaataaggtatgtctacacttgctgagagcacataaaagggatcagaaatggaagaagggaaagaggcatggagaaaaaaaactgcttttgtcctttggctattttaaatgaacagaatagaccttgtcaggtgcataaaacacacaggagtcctagttaggctctttaatctgcaaaagagaaccttaatcctatcttctatttggttgattgtcaaagcctttggatcatcctttgtctgtagattaactacactctaggattttgtcaaagattgcaacctttaattctctgctgtccaattcttatctatcttggtgaagtgacatgacatttaaggagaattgtctgaggaaaactccgtgctcttgatacatggagtttaccttcatcagagtccaaccattagagagctgcatacctagactacattaaaaaatgagtaaaaattgtttctattcaattgtgtttactgttatatcttagctataatgagaaatattttaatgcaacttttaatctattattttatgcaacttttaatctattatgctggttataagaattttatcaaggatgccatctactgtatcactcagcactctcttttgtagaactcattaaagaagttcctcttagatcttaacatcaggataaatggtgctttctttttgtagatgatgtaaacttcaccctgacatatttccttttttacactgactgccataaagcttaggacaaaatttgaagacagccttacagggtcacatggtatctacttatctgtggctttattttctttgtccccgtattctatcccaattacatagactccttgttttatgcctttataacttgagaaactgtctcagatcctttgtattactgagtaagctgtaaataaatacaaatactaaataaaaactaaaagttgcatttgaatttaaaattatatgagcatctttttcttttaaaattaaaaaataaccaggtactccataatattttactatgtaatttctcccatgattctgtatttgtgttacttactttgagtgtgtctctgacctgggctctgataataggacccaaaatcccatcttctttcatattgggattcactgtatgtttggtgaaggactcatcttcgtactgtgtgtacataactttcttataatgttttccaatttggtttgagaaattatccaaatgctgagacctgtattttcttaaagtgaagtaaaaaaaaattaaaccactttctcaaatagagatctcggtaggatggggaaacccttgtgcttaaacattctgctcttagattagctaacatactagttctctaaaaatttcttagtgtagtttgcaaagtccttatgttttctgtctagttggaaaactggaaacttctgatttgtctcctgcatcactgataaaagtcataggtaactggttagaagcagctacttagatcttcctgtcattcttattgctacagcagacatttgatatctctgggaaaaggcctatactggctgaaaagatactaggaatttttctaaagtctgtcctatcacttattctatgatagcctttttggttttaaaggtatttcttaatccctaaaagcaacttccaaccccaggaaacatttactagcattgttaatcatagttctgtgctattgggctatctcttccaccatctagccaattctctgagctgactgaaaagcaacctccttcacccatcttttgtagctactgggataaatactttgggagcagaaacatgaaccacttttcccctgccctctttattaccttagtttgcaaaagcaactacatgcggccaaaaagcacattttaaaaagctcaacatcagtgttcatgagagaaatgcaaatcaaaaccacaatgaggccgggcgcggtggctcacgcctgtactctcagcactttgggaggccgaggcgggcaaatcacgaggtcaggagatcgagaccatcctggctaacacggtgaaaccccatctctactaaaaatacaaaaaattatattttttgtattttgtatttgtgttggcgggcccctgtagtctcagctactcgggaggctgaggcaggagaatggcgtgagcctgggaggcggagcttgcagtgagcagagattgcgccactgcactccagcctgggcgacagagcgagactccgtctcaaaaaaagaaagaaaaacgcaatgagatgccctctcatgccagtcagaatggcgatgattgaaaagtcaagaaagaagagatgctggcaaggtcatggagagaaaggaacacttatacactcttggtggaatgtaaattaattcagccattgtggaagacagtatggcagttcctccaagacctaaagtcagaaatatcatttaacccagcaatcttttaagatggaatatcattttatgaatttatttttcccagtggaaagcactgactgttgccaaacactcctggattcctatctcagttctgtcaacaattctataatcttggccaaattttttttgttctttttcctagtttaattgtttttaatagaaaatacattcacataatttttattacagtgaaaactctcacttttctctgatgactctcaaaatgacctccctaccctccctgaattttctaggtagccatatattaatttcatgcgtgtaattccagaatacctttatgtcttacaaataagaaaatataaatattcttatccctttcactcctttaacaaaaggcagctatgtatacacgctatactacatcccagctttttaatttaataacatatcttggagaactttttgtattagtacatacagagtgtttgcatcctctttttttgatgcttagtattccattgtatgaatgtatcctaatttattaaactagttttctactgatggacattttgggttgtttccagtcttactactactaacgttgcaacagtgaatatgttgtacatacatcatttcacctgtgaacaagtgtatctgtatagttagatttccagagtgagatagctgagtcaaagggtatatgcatttagaattttgatacatattgccaagttattcttcagaatccttttaccaatttaatcttccacgaacaatatatgatagttcttttttctcacagccttgtcaacagatgatgtcatctggacttgtgaatgtgatagataaaagtagtattcccatgaagtttaatttgcatttctgttattatgagtgaatttgagtaacttttcaagggtttaagagctatttgaatttccaaatctcttaatctctcagacccatttcctcatctataaaaagaaataagagcagtatctagtttgtagagttgaagcgaagctctcagaaagggacaatacagtgcttggcaatggcaaacattcaacaaaaggtagctgctgttgtcatttttattattattaggctgaatttctttggtgatttgggggtaattcaagattaatttttacaaaaagacttgaatagaaaccaatacatgtgtccccttgagagctgtgaacttacatttcaccccaaacatctaggaccctatggaatgtgtcttgaacctttgcccagtggtatgaaccccaacaactcacttgtccatattcgctggtattacaggtgcatagtcccaaatgacttcctctgcagcaatgaagtattcccacctcttcatgtgccgcctctgctcacgagttattttcttaagattcctggttttctttgggcagtttttaatgtcaatgtaagcctgcatcccagctgagttaggacagaaagacaatgaaataactcaagagaagaaattatggttgattgaaatgcatatcctttaaatcaacttgtggaaggtttatattaatataataagagtgaaagtaatgctcaggcaatttttgaacattttagtttggaactctttaagtggcatccagaaaaggcaagaattttaaaagggggaaaaggaggaggggttagggaaaaaatttggaaagattccctttatttcttcttgagcaggcaaatttctaataatttttaacttcttaagaccttatgaattaagtcttgttaaattctcatttttctgtcatctgtcccttaatctataaaatgaagtagcaccagtacctaataaaattgttgttaaaaattaaatattaataacaatacataatgcacttatcctcaacaaagaaacaaaagttacattgttgttttaatattattgggaactctatcttccacggatatcatgatggttttattacttcaaatataattttgactactcgtgtgaaaagaaacagaaatgatctcatgaagtatctcttccttatatgtgttgcttatacattattttggtaacaaaatgatttcctattgtgatatcatttccttagattttagtctccatttatatgaactctaatctcaacagttttaaagcaaaaatgtgtagtagaacaatcagttattttgtttacacgataccacataacgtgggttgatttattttcccacctgaattccccagtgttctttggagctcacccctcagtatatgccatgtatgatccattcaacacacattcattgagttcctctctgtgctagactttgtgttcatcccactgtaaaggttaatgttttcatgctaaacttttacactttctacaacttagtgcttctgtaaatttgcagtttgtcttgtgctagcatctaggtcttttttgcatatgaagtaacccgaagaaagaatatctctatgtatgcatttgttttcttcctcttttcttctttcgaggaagttagagatctctttagcttttgcttaattaaaaaaaaaaaaaaaacctttgccaattccttcgctttctccatccccaaagagcaagttataaatctaagagcaaaatatctaagtttggttgttaggaactgaggaaagtttgtctgcggtgcaggtggcttgaaagggcaagggagaaagagggagttagtgcatgggaagaaaggattctgcattgagaagcaagactgtcaggagagtttcttgccttgcaaatgttttggggtgagagaagatatgatccactttccctctgggcccacagtcatatttgcggtagtggatgtagcactgacaagggtgatggctgagaccttatgatggttctgctccaggacctggccgttgaaatgaatggagaataattctggccccgagctcattcccagcagatgccagctgatgtggtcatgggcacaaactgttatatctgagaaagagggagagacacaggccaaaataagcattcagtcaagtactctgtgatcaaacattcactcaccaagtgtattgagcacctgctgtgtgtcaggcattgtataaagctttgagggaacagacactccagttgtagtttgtgccctgcaaaagcagacatctgagtgaccagcaaacaagcagtgacaactcattgtgataaatggcattatacaggtaacaacagagcttagagatggtggatgtgaactcaaaaacacagggattgctaaaggattaggccaagaagggaaccaagaaggtaaccgactgttctggtctgaggggtttcccaagattcaggactttaactattagaactggtaaaaagtccacggcaaaatggaatgtttggtcaccccagtctgatctcagctggagggagtcaaatcaccagaaccgccaatagggctgagttcaagcacttaatcctctcagctctctagctgtagtggtcgaagctctgcctaagggaagaagatgtgaagatgatatgaggattttcaattgttatttttacttactttttgattgttttaatgacaagtcaacgaaatcactttggggttacacactctccttaaaatgcagtgtacaagtcctcattatgctgagccattgggagcttttcatggaaggagtagtgataactgaatataaaaacttagttttgctccttctttgctcctacagtcactgggaaaatgctcatttgctctgtggggagactccatccttggcttttaggtttctgttttacatctcagatacataatcactagatactagataatgggcctgagaatcagttccttacccacacaaaggcttgttttttttaggagaccattgcaacaaagccaggattccttgcatcactaggaggctttggtggaagcgtttatccatgccaaagaaatgcttatattgagttcagcaattaacatatctgtgttagcatttatcatatgtattcaatttattctgctttataaggcagagggtttttacaaatgtttactattcttagtttctactgatggtctttccctaccttgtcccatttacccccaattattcttttgggaactataaattcgtaaactctaagctcagatcaatttatttttatttttgtgcatatggttttgcttttcttggcatccatatacttatacagattgttcactctgccaggaaatagatgttaggataaatggttagtccacttttgtaagtaagcacattgagacaactaatttatccagggccacagaaggtagtctgataatctgaagtctgaactcagattatctaaggtcgaggtcagttaactaagccccagtttttacaagctcctagtattggaacttgggatcaacattgagagtcatatgagtatattttcagaaaaccaagtggaaaatgtagtcaaatgaaatagaatacaatttaaaaacactacccagatctcaactcttaacaatatttgtgttttagtaagtgaagctatttgtgattttcagatggcattagagaataacctctaagaagtttagtgttttgaaatatggtttatttagtaaagtggcattttaattttttaatgtttttccctcaggctagtatcatataccctggatctttagttgtaggtcagttctaccagagagaaatagaagagatgtggtctaagtgggaattagttattttttctcttaacgattgctatgattttgccttctcataagtgcccaaatgcaaatggaaagagaaaatattctagatgccactgaatattactcttctgtcaccttttgaaatgctggttttttttgtgtgttgaggattactcctaatctgttcatctttactgcaatcttcctgctgatccttcctgctagggcttgtccttgaagaagccatggtcatcatatagaggaactgcagaactcggagagagtggctgagctgataccttaaggtcttattcaaagtacaggccaaggtgaaacctactcaggtcactatacctaacaaggctgcacatttcttctctagcttctaatttgtctcttctatttcctgtttaaaaaaaaaaagagaaaatatttccttcttgatagggagttgcaaaacagtgagtatggtcaacttctctagtgctttgaagaaaacaggaccgaaaaattactaatgattttactgttgtttaatggtacacagccctcgtgttacctggcattgtcccattcacatatccattgactgtgtacattagggatgatgactggctccagctcttgctttcatcaaacacagcaaatagtagcacgatttgcttgtcaaacgtcttctgtgtcccaccctcagttagggtccctatgaaaggaaagacatgttttcagtagcactgcagatagaagacgctcattagctttcctggatagcaaagagtttagggcaagcaatcaaccataatgatttcaacttgaagaaattcttattttttaaaatagcatatttatcaagtaataatggttctagggttatttaaaatctggtgccacactgtcttctttgataccttcttgctttggggaacaggctttatttcatccagcttgggaagaaaacatttggtgactctcaagactctgtacaagtatccatttcccccagtctcaatagaagagtatatagatacgttagctcagttggtaaaagcatcatgccccaagtttaatgctgtcatcttatttgtatatgaaagggggcattagataattgggtggaagtatcagcattaatccattctcactatgagaaaaacatgctgctgatggtaaaatgcaagaagagtcttttgtaagttttaaggtttttttcagtaccatcacagtatcttatatataccaggaaatggaaaaaaagtctttgtataatgagtaaatacattgggcatgtatgtaggtatggcctgagcgtgtatgtataggcagatggtgagtccatcacgttatttcccatgctgtggctcactgtggttgtttgttttaatgaaagatgggctggattctcatgggataaaatgaaaatccaagcttgctcctaagaagcccagccaataaaagttcttgtaaagtcacttgagtgtgtttgaaacctaccacccaaagttttcaacttgtttgtaagaaaggaagctggcatttcacgtgtttatagagcaaattaccagcccaaacctcagatatgtcaaacatgttagccaaagttctttccaagagctctttcagcagagtataggctactgtatactttctaaaagactttggccttgaggtaaatgttacagatcatacaagcatgacatcagaacatactctcaaacaggaatttgcctgggagaaccttaaggactgagatgaaggaggaatgagaagaaacagaggtggatccacaccctgaaatagcaggtgtttttttctcttgtcaaacaatgatctggtctccgtgccgtcttcctctgcttgatgtacaagaagttaccaagatgctcccaagctttgtcccatgacagaactcctgaccattccaacatttagttgttgaatcttttggtgggggtgttcttaccttttttacagataagcaggggcccaatcagccccgagttgaaatcctcgatcagattttcatgggagtaatagatgtgtgtgaggcatggagggtcatcatgggtgggtccactgtcctcactgatactccattcataggtgtattctcggcctggagccacagcgtcgtccatcttctccgcagggaatgtgtggtcaaggtaagaagcacctggaggagtaacagccatcaagacatgtgggcagtttctgaggattgcgttttcaccactctcaaatctggggatagctaagatgagttctctggagatgcatatgtccttcaatagtgaacttttattatttggaaagattcacatatgcccatttctatgctcatgtacttacaaaggctttgataacatggtgatcttaagaataacaaatgttatttgtaaattaaagtttagcaagttaattttccagggtacctgaacaattattatttaaatataatcagagaattgaatcgcctttgattagtaaaccatctcagaatataagaatgggtgatatcttctttgtggtgtttaataagacatacttagcctattaacatgagatgggaggatagtcagagctgtttatgtattattttgttttgctatttcagatcttctttccaactgctgtgatcctcagctttgttttatctctttatttcatcttagccatctgattatctcaattttttcccccgagccacagcgtctaactcccctatgcaggctggttgtctgtatgaatatgaaatgtgtccatcccctgaaacttagatgtcttactttgtactttgtgcacccaaagacacatcattaacacctccatgtatattggactttccctactgataggagagggagaggatgaagaaattggtcttctttattgaagagaaggaactgagatactcaatattaaaagaagtgtagagggttgggtgaggttttcaataataaaatggagcaagtgaggtcaggaaggggagaggtgagtgccatagagagccaagtggaatgaacagtttcctctgcctgaggaattcctcatttaattaggtgaaagattccctatcatcagctggtgacagaatttctctttgggatgcagttatttttgtttggtacaataacttgataaattctttacgagaagaaggtgagaacatcagtgtggatgtaggcagacaacaaggatctggggaaaaaagcctgaaatgttttacatgatggggtaaaaggccaataaaactcctcttactgaagcaactacactttttgaaaactgaaatgattaatcctttccctccccttcctttctcttccctttcttttctttttcctttcctagtttcttttcttttctcctttcttcctttctttgtcttcttccttccctattccccaccctccttccctctctttcttcctttcattatcctcattgaggtataatttgcatataataacatttaccacttttaagtataatatttgctgagctttgattaaaacaattacccagtcttatagctatagttccaatcaagatagagaagagttccatcattccaaaacatttcttcatgccatttgtagccaatgccctctgggcccagacaaccactaatctgctttatttcactataatttggcttttctgtaatgtcatatcaatggaatcatcattacacacccttttgtgttggattagtgttagctggtatggtatataattttctatcctttattttttacctatctttgtctctctcattaaagtggatttcttaaattctgcatacagtttagcattgcttttttattcaatcttatttgtttcttaattgtagtgttctttccatttacttttaatgtaattgatgatatggttgaatttaaaactgccatctttatatttattttctatttgtctatctggtctttattccttttccccttcctttctgttttcttttggattgagtatagttagtgatgtttaatctccattgttgccttcttagctttgttttcttagtggtgcccttccgtttacaatatatagtacatttttaacttgtcacaaacttccttcaaataatattatactatttcacttgtaagaaccttgcaataatatatttccatttcttccctcccagcctttgtgctattgtcatacattttatttatatatacataatataccccacaataaattgttactattttgctttaacatttagataatcaattgcctttttaatagattaaaacgaggaaaaaatttctctatatttatcaacttctggaacttttcattccttcttatgaatctaaatgtctctctgacataatatttcttctatctaaaggagttcctttaacatttttttctgctctgttagtgagaaattctttctgcatttgtatgtctaaaacactctttattttgccttcatttaaaaaagactttttgacttggtatagaatactaaacagacagattcccctatcttctaccctcccaacactttaaagatgtccctaattgtcttctggtgtgcatagtttctaacgataagtctgctatcatttcttggttttgttcccctgtatgtggtgtgtgtttttatctctcactgcttccaatattttctctttatcactggtttccagcaacttgatagtgatgtggcttggtgtggttttcttcatgttccttcttcttagttttgtcaaacatcttgaatctgttggtttgtagtttacattacatttgggaatttttcagtcattatttcttcaaatactttttctgttcctgctacttctgggatccaattacacatatgttagatcacttgatatggtcccacagttcactgatgctctgttcactttcttcagcctttttaatctctgtatttcactttgcagtttctattgcaatgtattaatattttctactatttcctttcacagtgtctaatgtgctattaatttcatccagtgtttgttgtattagtggtatccttcagtttataatatatttttttatcctttattttttacctttcttttctatgctttattttttacttttcatgtcaacaattgtattcatctacagaagttctgtgtatgcatatttatattctctatcttcatcatgctcatgcttttctctgctttctggaacatattgagaagatttatgatagctgtcttactgtctctgcctgctgcttctattctctctttcacttctcaatctgttgagttttttcttggttatgagtcatctctttctgcttcttctaatgcttgtttatttttattaacattgtgaatttacattgttgtttgttgcattcttgttaactagtattgagttttattcacagttaagatacttgaaatcaaatcttgttttttattctgttgcctcctcagcagcctgtagtctaattttatccacccactgtttctaaatccttctgacaattctatccagtgctcatttattaggaggtctttctatgtttgatggtaggaacataaacgattaccggccctgagtaaggtccagggactgttccacctgttcctttcaagtgacatttttcttaccctcagtactttcctcacatgtatgtgcagatcagtattcaacttgacaaaacctctctgtagattctctagagctctttctctgtgattatactgtcctctgcaggactctgccctaaaatcacaaattctagccatttgagcttctccgaagtccaaactctatttcctcaacccatagagactctgtctgggttctccctgcttgtgctgttccctggaaacactcttcaagcagtaagcttaggtgctcatagggcacatctggtttgttactcttcttttactgtcttgagttgtctgtcattcgatgtctgaaaacttctgttttatatgttttgtctgcctgtctagttgttgagaaaaagggtaaatctggttccttatgttctgaagccaaagtctgagatgctaaatttccatataaaatatttttttacattacagcaatgtcagcttcccttctttaattgtacctttccccatcccaactgtggaaaatctattccactcaaaacgctttgcatgagtttgcatggcatcagcatatgtttggattctccaggtgggagtggaaaataaggcacatccattcaatagcaatgaaggattcaggtactacagtaacgtgcaatgtatctcatgaggttctgagcatggaaaccataagttgagtaggtatatctagatttacttcttgcataaagtccttaacgtggaccacaagtccatgtatgatttacctctacttctctcttcagtcttatcatacgtcttttctcttgtttactatgggctccttgtcccttgggtcccctgtcagttccccagacatccaagttctgtcctacctcagggtctttgcagatgccattccctctgcctagagtgctcttcctcccgtcttccttttgataaatatgtgctcatcattcagacatcaccttgaatatctgttcacttctacctttatctccaattctgatacacatttttttcttttacagcacccatcacaatttgtaattaaatgcctgtgagattatgtgactaattcattttcttctactagatcataagtatttgtgtcctgcacattttggtcacccaagtgtgagttcctcaaggaaaagtgctggattgtatttgtcttagtgtctctggtgccttccataggtacctagagaagcatggaacatgaacatgaagaagatgctcagtgaatatttattaaactcctaaaatttaaggtcctatgggctacagcctaggtcaacaagtcaaagctcatggctgtgtgttgttatgattgcgtaatgttaaaatagattaaatgccaacattaaacatccggagaaattatataagaatttggattactggtttctctttaaaaaacaaaaacctggagatctggttaacaacaggaccaaactcctgcacagaattttgttggatctggatcttagctgcccttttctgctttctgatgatcagttcttactggaccaattttgttcactgaactacttatctggctactataggcatctgagtttgtgaactttgcgctagcataaagtggactttgttgtgtcttcccccaacacaccccaaaggatagcttgacactaataactaatatttactctaggctgtactttcactttgataataaaactgtcaagagctgagaaatgataaaagcttaagtcacttcctgtaagttataacataattctagtctataaaagaaaaaaagtttatggagaaagtctccactaataagcaggaagcattatctgtgaaagattacaaaagagctttggtaacaaagcacaaacaggactgataaggagagttgccctctcaggtcagaacttgtctattaactgaaattagcatggctagttgatgagctgcaccatctaccttgaatcaagcatgacagcccttcttcaatgcttcttgctacatggcctcataaagttgaaaaatgatgtttctggacaggcagcttccactgtttcaactgttaaaacatcacatggggtttctatagtagaaaatgatattctttccactgccttcacaagctcccctaagggcaaaacattatattctttgcagggtaggagataacttttgaagttcttcctccctttatttttctgggtaaatgtgtgctcattcttcagatgtcagatcaaatatcatcttacacccttcttgatctctgattgtgatacctgtttgtttgttgttggttttttgacagcactcatcgccatttgtaattcagtatttgtgagactatatggttaacgatacttttttctgctagatagtgggagaaagcacttgaacttcagggtcagagttgaaaatatcttggtggttgtatcatttgctaactgtgggaacttgggaaggtttcttgaagtccctttaacctcagttttttcatttataatttaagataatataatcctttttctagagataactttatcctttttgatgggttatgaagactggaaaatatttgtaaaatttctggctcctaacaaatgctctgatagcctgtgggaatacatgttcacattttggttaagtattttctttcccagtcatgttgcaattaatacagcctctttcctttatgttctactttagataagatagatcttaagtgtgcttgagttctggtaacacatgtgagtaagatagaaattggtgattttcttagtttgggttgctgttaacaaagtaccctggattgagtggcttataaacaacggacacttcttcctcacagttctggaggctggaagtttaaaatcagggtgccagcatggttgggttctggtgcagggtctcttccaggttgtagactgccatcttctccttgtatcctcacatggtagaaagagggtgagtgagagggtcccttttataagggcactaatctcatcatgagggctccatcctcattacctaaaaatctcccaaaggaggggggagggatagcattgggagatatacctaatgctagatgacgagttagtgggtgcagcgcaccagcatggcacatgtatacatatgtaactaacctgcacaatgtgcacatgtaccctaaaacttaaagtataataaaaaaaaatctcccaaaggccccacctgctaatgccatcacactggaggttagatttcagtatgtgaatttttggaggacacaaacttccaatccattgtagtgatgtatctattccaaaggcgatgaaagtaaataagacttttttggtaaaagtactttttttttttttttttggtaataagtaagacaaagtacctgctcaaaattatcagcaaaatcaataattttaaagcaagggaaaaataatgcatagtccttactttctaatcagtcctcggcccctcagtttagttcagtaatgattaatatcatcatgatcatgaccatcatcatccactaggttccaggctctgtgctaaatgccagagtacaaatgtaaagaagacagggcctgggcccctgaggggctctgcctagttaactctagggtacatgttggtgccctaattgtgataggtttgacctctagatttcttctagggctacaattagaacacactgtcaatctggaatgagaaccaaccaatgtaagtatctaaaaattgcccaagatgctataacacttgtgctaggtatagcagggtgactgattttctaacaatattgaacctatctgtaaacaatcaatgtttcacacctagatttattttaacacatactgggcttaaaaaattattgtatatacttgtgtacatgatattttgagatagataatgaaaggttactctagtcacacaaattaatgtctgtctaattgatcaaactaaattactcagaatttcacattcgcctgtcagttacatataagatgaatttcaaataattaaatgaatgatgttaattaagtttagtatactactaaaagttgaattatgagcatcttgaaacagtgaatgatatagacttgtacataggatatattctataattacactgagtgagatggctaatgagacaattggggtgtaattttatcaatgcttttattcttttcacttcaaattattttacctttagtctagaataaaacaggtttgttgtatctttgattttacaacatacattaatataaagtataaaatacaaacagctattaagaggaagcatttgtgagatgcagttttggtgaatgtgattttgactttgtaatcaaaataaaaaaaattaagctctaaactgaaaagaagagaaatggacagggacaactattgtgctagagcacaagaagtccttgttcagctgcttgctggaataaaatctttacacaagggtagctcttcatttatatttactcagttctgttcatttcctgctcagtcgatagtcagctttgtattgtatttattcttgtcatgatgtactaattacttgccaaaggctctcagtattttttaaaaatgaaaaatggtgcatacaagctttgggaaagtgaagttacataaagagcctttttggttactcattagggtgctcactcagtaactcttcccttgttacttatttttgtgaacaactcttttcctctcctaagttaataaacttagtgaatgcttcactacattcaaagattcagaatattcttttagaagctataatgtaggcaatgggcgaatcaatgctgacgttttataaagagctgatttcattgcacaggacttgcaagtctctttggaaaagggatccacatttttgtgatttattaaatatacaaactatagccgttatagtttgtttcaggtgtttatcatatactcaaggaagtctctacataaggccaaaatattcagatgagaagtgaaaaaatgtaatcacctacattaagtcaagcattggaatgttttggaaaaatctagaagagcaaatttttgtatagagaatttggcaacacttagatacaacgaacaatgtctggcagaaaacgtgttttatttggagagctggcttaccagcagatggctatatattatagaactaattttgtgacatcacattcatatgcaactcatatatttaaaatatgagaatataactaaaagaaaagaataatattaaattctccatgaaacaagctttttaaaggtaattgaccaaaacgactttgaaaattttactgaacaacaaactttgctcaaaggtgcagcattgaagtcaatttgatgcatgctagttacagagtttctgaaaatttaacctcaaattgaaaccctttagtgacagcttttaagtgattagttacagttgcagatactttattccctgatctaagacagtcttattaaatacattattaaaggaaatgtccttacaagcatttttacaaatcaccgtttgtccattctgtcaaaaagggttatccagagttctcttatgttctgttgtggtttctcaagccagtgtaatactatcttaaccccctaccacctatctctcaaatatctacctctgagatagaggaatctggattctcatgtaactggctcagcatgcagttagtttatccccactcccaaaaaaatagctcaaaccacagagggaggctataggtgagggtgagtgtcagacatggaggaggagatgttttattttaatgcagagggcataataaaatcaacttataaggcttgtcttttaccataaaagatactatctgcttactaggtttgcatctcatttccaaggtaaaattttactttccctaccaatatgtatttacctttcttagattcataggaccagaggcaatattatatgccaataatcatgtctccagtgaaagctgtgggagcattttaagcaattgctcataaataattgctggctgtagggaatgtagggacaaataaacagtaaaggaagagggatagtgttgcaaggttcattcactgtgcaaacagcccaggtagggtccaaagtctacaattcttacctcctcccttatttgaaatgaaacctgcatgtgacattttgatattttgaggtttctcccccttcttctttacattgctgaacttctgatgcagtcgtctagaagcctcataagtaggtgaagtggttgttcactatgtcactgtatgattttaagaacataggagaaactcctgttcccactacctcacccagagtcttgccaaattcactttggaagaaatctcagtgccacagttaatgcttcattgtttttcctcaagccaaagattaagtgctaatgcaagtactcctaaggaaggtagttcattgacctattatcagtcacttataccttagtgggtatgagtttgacaacagtttatatagaaaacaataaatttaaaaattactttctgattttttctgaaactaacaagttttaagataaatactaaattatttgaacacattttaattgaagaattatctttactatcatggctaatatttattatctgttatatgccagtcattattctaagatttcacgacaacaaacctgtatgacagagacatgattattattaccattttacagatgagaaagatgaggcacacagaggttaaataacttcataaaagtcactgagccaggatttgcacttattagtctagttctaaaacctgcacataaaccactctcctactcaattattctctcaaaggtatgatggctggaacatgtagaaggaaagatatttaaatgtgaaccatgaaaagtctgaaattattttaaaatgttctcataccaacaactattataatatggatacaattttttataccagtgcctgatggaactctactatgcttacaatgatctgaacatcagcataatgggataattagaaccatattaacatcaggtacttactattcagcggctgatacaataacttgcatgactattatctttatgattattgccatcattgtcatcattatttatagagagcttatccgatcccaggaaccatgtttagtactctacctaagtgacttcatttaaatttcaggcaatcttatgggtggttataatcatttccattttatagatgagaaaactgaggctcagagatgctaaagtcgtagaatcagaaatgataaagctagaattttaacttgtctgcctttaaagcttactttcttaaccacttcactatgtccaaaagtctaatactattaatgcttctagtctcaccaccaccaaataccacttattgagtgtcatctatgtgccaggaagcctatatcaggctagttctatgtcactatgtcagtggctcatgggccaaacccaaccaatttcctgtttttgtaaataaaattgtattgtcagaggcggtcttactctggtgtatgacttgagggaaagaatacggtaacaaagttaattagttctggcatctgtaaccaaagccaaaaaaataggtatcgtctatggctgcttttgtactaaaaggcagagttgagtacttgcaacagagatcttatggcctgcaaagccaaacaaacttactatctggccctttacggaaaaatttactgacccccgccttaaaccatctttcaatgtatgtattattattcccattttaagatgaacatatgagaattcagagaaattagataacttgccctcccaaacattaaagagtaagaacccagtgaaaaatgcaggtctagaggactccaaaaccttttccttttcttctctcaaaacttacaacagcaacaatttttataattaccagttgcaagagatttccctaacaacacgtggttaacagtatagttttaaatgttgatgctggtattaaagacttagacattttcccttttcagaaaaatattagatttatcttaccttctgataatttactgtacctaattccttgaggatggatgctcaagggcttatctgccttatttttaaagtgaacttttatgatgtctccgacttcagcatataaagtaggcccaagaagtcctgtgaaaacaaatatttaaactatgtctgtattcagggtcatcaaaggcagagttgctaagcaagaaaaacaaacagatgataccaagagtgattgctaccattcctcctggtcctgaggctgactcacttattttcaatctagaaggttttagcagctcattaactcaacattacatgtacacagatcacaatagaatggtagaaacacttgtcctggacccaaaagaagtcaacagagtaggagaaatagttctggccaagtcttgcccactttgacccactgtcattccttagcaataactttctttgcttaagaaagatgttcatttcaattacagagggtgatgcgagagggtagttactttagatttctctgacatgggtgtgctcagagacctagatgaattgaggaaccaaatcacacagctctctggctctgaggcaggagtagtcttgatgtatctaaggaacagtaagaaaaacagtacgggaagaaagaagagatgaggtggatggtaggtgtgtagaacaagggaggccctatgggctacggtaagaacttgaattttcttctaagtgaaatgggacatcactggagcatttttctttttttttttgagatggagtctcgctctgtctcctaggctggagtgcagtgatgcaatctcaggacccactgcaacctccgcctcctgggttcaagcaattctcctacctcaacctcccaagtagctgggattgcaggcatgcaccaccacacccagctaatttttgtatttttagtagagatgacttttcaccatgttggccaggctggtctcaaactcctgacctcaggtgatacacccgcctcagcctcccaaagtgctgggattacaggtgtgagccaccacgcctcgtctaagtgaaatggagcatttctaagtaaaatgaaaaaccactttgtacagcagagacatagtataacgtgtattaaaagttcatcctaaaacaaaaagttcatcatagctgctgtgtagagaatagtctgtgtagggacaagaatggaagcagagagattaggcagtataggaaagagactgcagtgtactgggccagcacatgtagcagaacgtgatgagtagtggttggagtctggacatttttgtaggtaaggcaaacaagacttgctgatggattgcatgtggcttgtgagagacagaagtcaaggatgacctcaaggtgttttatcagaacaactgggtaaatgatgttattagttactgcaatgggagaacacagcagagacaggaggttatgggtgcagaaatcaagaatgaggttttactttctacatgccaggcactgtgttagaaagtttctggctacctggatcaaatacagtccctgtactgaaggaactcacaagctagtttggagatagatgtatgataggagcgactgctgagatatgggcaaaatattacagaagaagagaggatgaagcacaaattctgtctggggagttagggaaaaagttgatggctgagtcagaatttgaggaattgtatatagtcagccctccatgaccatggttcatattcatggttacacatccatggagtcaaccaattttggatcaaaaatattcaaaaaacaacaataaaaaataaacaataaaaacaatacaaataaaactctaacataatagcaatttacatagtatttacattgcattcagtattataactaatttaaagatgatttaaagtatatgagaggatgtgcataggttattgcaaatactatgaaattttatataagggacttgagcatctgcaaattttggtatctgtgagtagtcctggaaccaataccctgtggataccaagggatgactgtactagaatttccaaagtgtagtccttggagtctctgcatcagaatcacctagggtcttaataagaggcagatttccaaatatcacctcagcctcaatgaatctgagttctggaggtgaaacttgggaatctggactttaacgtgtgctccttggtgatcttgatgtctttgaaatcttgagaatctatgaccaaaagccccattccagacaagtgacagaaatcaactactgtcatttctgagccatccacaagtgtcatgggattggcttctcgccattaggcgtcctagaagcaggagaaggaagtcacggcactcatggagttcagccagcatttgtttgcagtggtgatgataatcataataaggctttcctgtactgtttcccttaatacattcaagcactgtaagtccctacattaatcctcacaagtttttaaggtagatattaagatcctcattttataggtgaggacactgagcctcagagagtttaaatatcttgcctaatatcacacagcatcatgatttaaagtttaatatgtctgtctctagatcgtgacttttaagccacttctttatactacacctccaccttgtattcattcctttattcattcctttatttattcaatgaatatcaagtgcctatattatcctaggcatcagaattgcaatggtgcgtaaaagagtaaaatagatacacccactccctgccttcatagagtttataaaagtcaaacatttttatagttctataactttatacgtttttatagtaggaaagacagattttaaacaaatgatcacaaaaacattcaatttaaacctatggtaaatattatgacagaaaaggagggaatactctgaagagtatttgacagtggaatctagtccaattggaggtgagttggggaatcccttcccgaggaattaatcctttaactgaggtccaaaggcagagaggaaaagggatggccaaagacattctaaaaagttagagtagcgtgcgcaaaggccctgaggtgccagaaaatgtggcctttttagagaactgacagttatccagtggggaggtggagcttagtatgtgaaaggaaggggcagaaggtgaagccgaaggcatcctcagagtcccatcatgcagggctttgtaagcctcatagagttttccctttagcctaagagtatctggaagccattaaagagttttcatcaggggtgcaacatggaccagattttggttttaaaatctctggctgtatttgtggaggatgatctcggaggagactgagcagagaacaattgagagaacagatagaagactccaggagagatggtggtgactgagattatgatgagatgatgaggagagaatatattagtgatgtatttatgagataaaatagttggaacttgaagatggattggatgtggggtagagaataaaggacatcagttgctgtggatggctgatgaggttctgatttggggagctgggtggaggagggtgccattctctgagatggaggacaccgtgggagggctttgtttggtgggtgtagtaggcagaataatgtgcccctgctgagatgtccacgtcctaatctctgggacctggaaatatgctactttatatggcaaaagggactgtgtatctatgattaagaatcttgagatgagattcttctgggctgtccaggtggatcccatgtaataacaaaggtccttatcagagggatgcaggagaatctgagttaggaagagcttggaagatgctactcagctggttttgaagatggaggaaggggccatgagcccgtgagtgtaggcagcttccagtaactggaaaagacaaggaaacaattctcccccagagcctccagaaggaatgcagctctgccaacaccttgattttagcccaataaaacccattttggacttctcatctgcagatatataatcataaaagaataaatttgtgttgttttagccactaagtttgcagtaactggttacagaagcaatggtaaactctgatttctgggacagaggtcctatctttccctacccctgtcttgccacccacggttgtcctattcctttccttgaactcctactcctggagtttattctgatcttgtgcctgaagctttttgtttgtttttatgttagctttacacaggactgtggaggtcacaaagttcagtccttattttagttaacaaagcctgggaggtaggaatcgggggacaaaggtgacttgcccaaggtcagtcagtgatctggtagcattgctgggatcagaactcagatctctggactcctgagccaaagctctccctattccttccacggggcaggctcaggcccccatctttatagaatagtccagatgtctacacctcttttgactcctgacatgtcggactccactgactgacccccctcttccagctgctaccctctgtcttggctcctgatggaagtttccactgactattcccacctaccccagctgccaatgagcccaacagggtgctgactatgctgccaattgtgtgccgcatttagttgccatggttctcttgcttggttgatttgtttgttggcatcacatgcctgcaaataccagatgcccagagaaagtctcctaagttatttaacctaataagacctattacttcagtggacagtttggagtatttattcaacctcccctcctgcttcttcagatttaaggcaaaacaaaaggatgttttcataaatgcataccaaatactttcacgcatgtaggaaaacacatggctaaatggttttcaagctgctctttagctcctccaacagccagatggcctaaaacccttctaaccctctcctcagtgcccaaagctggattggggaaaggagtggcctacttcagggcttggggaagccagcacagcatgtacccaatttagtgcagttgtggaactggaaaggactgcagaaggtcaactaatccaatcccctgctcttaggtgaacaatgcattacataacacaaggtagtgattgttgcagctatttcaaaactccttcagggacaaacattttataatttgtccctgaaaaatatgcagactcaaaactagccaatttaattaattatttatttatttagagatgaggtcttattttgtcacccaggctggagtgcagtggtgtgatcataactcactgcagcctccaactcctgggctcaagtgatgctcttgtcctaaatgaccctcttgccttagcctccccagtagctgaaatgacaggtatgtaccaccatgtctggctaatttaaatatatatatatatatatatatatatatatatatatatatatatgtatgtatttttttaaatagaaacagagtctcactacattgcccaggctggtctaaaactcctggcctcaagcaatcctcccaccttggcctcccaaagtgctgggattacagtcatgagccactatgcccagccaagactagccattttaaagcccaagacagaattcctaaaaatgaccccagctgtactccctcacctgcccaaatgtccacaaaccttattggatgggcatcttcatacctccaatcctacagcccagccccctacaattacaagaactaacaacaacaatagttcatgctgcaggagtgaggctcatgactttttcagggctcagctagaatcacacccagcagatgagtggagcaggacataggggaaaggtacaaataacacaggactagtctggggaatgggagaggccacatagttaatggcagtgttcaaatccagatcttctcagtcaaaataaaaggcttttccttcacgccagatttgcctccttgtatcaactactatagagttacaaaggtgaataagataccactcctgcacttcataagttcatagttaagcaactttggacattcaggaagagattacattaaaatggacgtcgaaacacctttgtccacatgaaacaaatatattctgagatacacaggggttgacagaaaggtgcaaaggccttacacataaattggagactgttctcaccaactgtcagagtctacctctaacaaggttaaatcaggaaatcactaaaaaatttaatcatctgaaaggactttgatcacagaacccttttcttcaaaagctatccatgcctttttattgtttaaaagtcttcagcctggaattagtcctttccgtctcttatggcatttagcacaatgtctcacacagcaaagggattaaaatttgcttagcttggcaaaagccacaaaaggtacaccttcaaataccggccccaatcctcttttcctggccctaatgagtatgtttcccaccttatattcccttcatctacctacaatttaatttaattaaatagttcttaagtatctattgtacatgctaagcttggagctggagctatgaaaatgaatagactctgtgatataggacaggacatccttcaacttcctactcataactacaaacttaattttatttgcaacgttatcctctgctttcctggccccccatgaaggtggtagccattctacctaaggccaagccagcccaaggtttgaatcccaatgcttcctgcttcttctaagtctccattaatcattctctctcagatgttttatccccacattttctattggaaaggacttcatggcatttctatagagtcttcccttaaatatttaagtctctgtattcctttttataaaattctcaaatgtccttaagctcctcagtacccacccccacccccgaaactaccctgtctctcctcccatctggaaccaagtttcagggaagagttatctataagacccttgtgcttcagtttcctcgccttccattcactcctcaacaccctgccatctggtcttgtcccactattccataacaaagggaccatattttgacccttatattaatagcatttgaccctttgcctccaggataacacattctctagatttcttctcccctccctgaacaggctttctcaagctccttggtaaacttttctttcttggctcatcccttggactttgctgctactttgagctctgtctgcagccttctcttctcatcacatcctccctgggtgagttcacaccctctaaattcttcatttgccatctttgttctgatgtctcccaaatgttgacagctagctcagatctctcttttgagggccaaacttctacacccgtctgctcacttaacatctctaggtagatattctatacacacctcagactccaaatctatacttatcaccttctctcacaaactatctccttttcttacattttctttctcactgaatggcaccctatccattctgctgttcaaaccagacaccttgaagtccataacaattcccttttcttcctcattatctgcatctaatgagtcaccaagtttaatcaactttagctcctaaatatctttggactccatctcagcttctctgctatctggattgatacaacagtcccatgactactttctctggctctggactggtctttctccaatctattctctataattggacaacataatctttctaaaggacaaatatttctcctgctgaaatccttttagggactccctattcctctcaatataaagcctagcatggatccctgatccccatctagttgcatctcttgttaattccttccctgaagtttgtggtccaactgtgctgatccagttatggttccacaaatataccatactctcacctccaaacttttaaacattctgtgccttggtttaaaatgcatctatcacccaaccccttgcctccccacttggctttccaagatcctactcttttttcagctatcaatctagaaatagaaatactttcctgaccaccagactggagataggtctcctatgtcctactacagaatcctcatcatagttcttccttattactctactgtcattgcttgtctatccataggttatccccaatagctgattggctcctggaaatcaaggtccatgtcttattcactttatcccagagcctagaatgtagtaggttctcaatatacttttttgttgttgttgttgttgtttttttttttttgagatagagtttcgctctgtcacccaggttggagtgaagtgatgcgatgtcagctcactgcagcctccacctcctgggttcaagtgattctcatgtctcagcctcctgagtagctgggactacaggcatgtaccatcatgcacaactaatttttgtattttcagtagaggcggggtttcaccatgtgggccaggctggtctggaactcctgacctcaagtgatccatctgccttggcctcccaaagtgcatgagccaccacgcctggcctcaatacacaattatttaaaaataaaagaatatttaaatgcagatctgtttaaaattaaataaatatataaatgaacacatgtgaagactatataaatgagtggagaaatatagatatatagatatccataatactatgatatatatgatctaagttatgattagtaatagcagcaacaataacaataatgtagctaacttctactgagtgcctattatgtgtcagcatcattataaatactttgtacttattaactcaattgatcctcttaatatctttagaaggtagggattaattcaaggtactggggatgtatagaagagggaagatttaattctgctggtattgagggggtgtcaatgtagcttcagagggaaagtggcttctgggtaggtagtagtgaaagccttggttttgggtgagattcgaaccctggggaagaatatctggtggggatactgagcaggagtggtaagagaagtctgagaaaaccaaggggaagtggcactagaaaaaacaggtaaagcgagagcttcagaaaggaagagtgttaaatgtcctagtaatgtctagtagtaaaagaacataggctctggcacctcaagtcctaggtgcccttttgtgagagtaattttagtagacttattcatactaaagcagattagggaaggaatataggcgaagaaatgtagagaatgatacagagttctcatacagaaaactggtagtgaaggaaaggagagaaaaggaaaaggcaggcagggtcaaggggagatttttttttttctttttctagataggagttaactggacatggtttgatttggttttggtttagtcgttgatttttaactgaaaggaagactcccattgactaaatattgaagattaaaggagatcagaagaggcaggacagactaggatgattctgggaaagacagcaggtcttcatctgattggggaaagggacaggtgaattactgacaaggggattcaactggaggaagttctcccttgatggtctctatcatccctgcggaatatggtatcatagttaagatattagaaccctattcaacccagtcttcttgataaaggaagagatgaggaaaaaataagagattttctttaaaaattatggctattgtatatatcacactaaataaacagaagaatagacgggaaagagatgcaaaagagtcagccatacatagttcctttgaatgaatctagggagccaaatggaagcaaaatatcattttgcgaaggcacatctatgctcattaaactagaccataatctccatgaacccaggatatgagactgtcttgtccactattgcatccacaatgcctatttcaatgcccagcccataccaggtactcaataacagttttttagatgaatgaataaaaattcaaacacttataagttttatttagttattttaatcaaggttaaaaacagagccagcttcatgggtatgtgacctgggcagtttcacagggccccatgccccaaagggcccctggcttggtttaatgctttgcagtcactgtgaaattttcaataatatgaacaaggggactcacattttcattttgcactgggccccacatattatgtagccagtacttcttaaaaaaaaaaccacacgtttctataaattttcagtaaatggatattttagatgcatgtgaatgccaaattacccatagaaatttatctttaaaattaaaaaagtatatttcaggcttacctgaaatggtagattgtggtttttctttcttaaaatatggttcatactctctgtagacaattttcttaaaggaagttacagaaagattcaaactggaaataaaatacaaaaactaatttgaaaggcatattcaatatctatttctcacattacaaaaaaagtagatctctcatatcttcagacttctagtagaataccagtatctttattgtatttcagaagtccacagttttataaatatgatcaataagtaaagttaatgaaataattattggtctcttcaaaaatatcctgttgtgataactatttgttcacaagttaatctaccctaatatcattcctcagaatcaattttctaaaaagaacccaatatcacagtagaaacccaaactgtaggtttagattttatatgattaaaatatgaccaaatcctttatgaataaatatatgagctgtttttcaactgatcaatcaaatatagttttaatctactggggaacattgtgaaaaagtattgatttggtggaatttatttctagttgagaggtgagagatggctaatggggtaaaagccctgggattcatattggaaacaaacaaatgaaaaaactgttttggaaagagtcagtaacttgtccaagagatacagttgataagtggcagaaccaagattaaaaaatgtgaaaccactgcattcatgattttaaataaaattagagagaggacagacaacagggagagttgtgagtggtgggttactttcctgtttttgctgttgttgttattgttctgtacctctaaaggcaaatcagtcttatccttgtcttaaactcaaagatgagggtaaaaggaaagagaatttggagaaaataccttgcaaatgtctaaatcagttgatcagagtggctttgttttgcttcctaatgtggggacagtggcccagccataatcaagacataacagcacccacatatgccatgacttctatacagcgcggtggctagggtgcaggctgtgaattcagtatctctggacttgaagcctatatctacctcttattgttttactttgaaaagtttacttcatccatttgtgcctcagtttctacaactatgaaatgagattaatactgaaatctccttcacagaattgttgtataattttaaataagttgatatgtgcaaaaggcatagagctggcacactagaaatactcaatccatgttagctagtaatattattttgtaaatgtaataagagttagtctttacccttcaggttttctcagaaagcaaaaacaaatctgtagttacagtaatgctcacaaattgtaatatgtggaatacagaaactgtgttaatatgtgggggcagaattaaaggaggcacgtaagtacttttagaatagctagatagagaaggtagtggattctccatcactggaagcattcaagtagaaattagacaactacttggtaaggtcattggtgctgagggaaaggggaaaagtagaaggttaaagcgtggaagttgaatatgaattaaatgaactcttagcattcttctaacttaagaattccaggattctatatactaatgtccctaatgtggaagtccatttttatttatttatttttagtacaattgaaaagttattgtcctcccctgccccagatctttaatacagaaatgtagatgatggtgtaaaatctttactaaaaaatatcagtctcttacgtggagtaatttcaacagagagatgtttcctaacatgtttttactatgtatgctgtgtattcatactgaggtatgtctattttgatctgaacaatttctattggaaaataatctatctgattaaaaagttacagatcatatgaattcaaacaatgtgtacgacgagtttttcatttataaggattgtttaaagatgatttgttcataatcacaaaatcatataaagctagaaccctagaaggaaaatgtatgtatatcttttcttcaatatctctttgtatacatgtgagtgactaaacaagttttctaaggaaatttttgaaagtgttcaccttagacttggagcaagaataatagatacattttacctttaaaaggcattgtcctgctaatattatatgaaataagtagatagatgtctgctttgtgctaaaatacactttgccaaaagatggagttggctatgttgatattcacctagtgagtatcatagctctaggggcaggacaagttagaacaagttcttagtttaagcagccagatatatggattagatttttcataagaaaatgctagagagaaatgatatgatttagggttaaacaatatgacagtttgtctgggttgtgtttctatggttttgactcaacaattcctaccagaggaacgaatctccagaactttggaaacttacccacaggatgaggggacagaatgaccagtcatggttccctgtgtactcaccatgtgaatcagacctttgccctatctggttctgcctccggtattttgcttgttattttcaacgctaactacagacaagagaaaaaactcccaagcatgaacccagcatgctacaagaaagccaacaaccaagtctgcattctactcatgagcaggcaagattagtgttagaaggactgttattttccttggggttttagcttacggcagttcccaaagggtgtgggtgtgacctagattatcactttgaagtacgatatttaaaatgattatttttgagaaggagggatctcttcttattataagaccaagatggtatgtaataccctccaaaataacccagttacaatgagagttttaaaaaggttaatattatacactaaaagatctcaaaatattacattattttttggcagattactttggttttgtaattgtaaaagaggaacacatctttcataatgaagtgtgatgtaaggaaaaaaagtgagtcacactagcaggtttaccatttaaaaaataactaactggaaatattgaatagactgtatgatttagttaatttctgagaagtcttatttttaacatttcaattagaaaaaatagtttgcaactcaaggatagtattttatctgaattaaacctcctctcagttacatatgcctttaagtagccaaggtaaaccatatcccaggacatgatgaacagagagaaaaaaaaatgaagagtcacattcaataggataaataagtcaaatatgaagcagaaaaaaggtgaaagtacaaaaacatacaagaactgatgatattttgaaagtcatttataaggcagcaataaaattatatgacaaaaagcacaaggtgttcatttttagttttagaagatgaagctatgtagacaatggaataaataatatgtaactaggagtctcataaaaatactatacaactaaaaatctggaacaggagtttgcaggaagggctaatgagggagcaagtgcctggtgcctttgaattaaccaatatataagccaacacaaacatactaacaaaactgtattgaaaataaacttgaaaagaaggtagcatctaaccaatcaaatagggtgctttctaaaccctcagaatgataaactacattgttggatgcaaaattagcatttgcccagtttatttaattcagtatactctcctattagttatatttacttacctgaagttaaaaaaaaaaaaagccatgacattgcaaagggaatgttctctaaaagaaatagattttcctctctagagaagcccacccggactccacacctgagttaccttgagtttgtgggctcaggtcggtagctccaactgatgccctgagcagccacgtagaactgccttagctgtgccgcttctgtcccttggctcccccagcctacccagctggtgcccaagaccaccaggacccagaggcgtgggcagcctgggaacatgcttcctttcctgctcccgctggctgccaccaccccaggacctgggcagcgcttgccgagctgctaaccacactccgggctgtcccagctgcaatgagctctagaggctgtgggtggcagcgtcctcctcccctgcagttcttgcaaacggcagcagcagcctctggctctcactccctccgctttttctggggcttttcctggcaggggtttggtgagatcacagctcccagtgaccagaggtattagggagagcaaccaaactagtgactgttttactgcaggtgaagaaggggcagagatcagaggctctagcaggcgggacaatgcccagggattcatgagccggacaaagctgtatccctccatttccacctgccaacaccacggaagcagtcgtccgttaccactgacctgaggcctgcctgggtccaagctcacacttggagaaccttctgtgcagtgcagtggcacccaaccaccttaagcagatggctccccttttaatctgaggaaaagagtattgtgccctgttactgggcactgaaacactattttcaagtggtgaagaagcagggaacaaacacatggacaaggcctactgctctgaatcgccttcctggcctctatcaaggcacagttctgccttgataagggcctgtcgccagctaagctgcagcatagcagcgggcttgaagagcttggctgaaaaaaatcagttgtccagatttcagtttcacttactagctgtgttgtcttgggcaagttactgtacctctctgttcagttttgacatctgtgaaataaggatgacaataataatttttcctgatagggtatgttgggaggataaaatgctactgtaaactatagttccagcacttaacacacagaggctaggcgcagtggctcacgcctgtaatcccagtactttgggaggccaaggcgggtgaatcacctgaggtcaggagttcaagaccagcctggccaacatggtgaaacccttctctactaaaaatataaaaaattagccgggcgttgtggtggacacctgtaatcccacctactcgagagattgaggcaagagaattgcttgaacctggaaggtggagtttgcagtgagctgatatcatgccattttactccagcctgggcaacgagagcaaaactccatcaaaaaaaaaaaagaaagaaagaaaaagaaagaaagagaaaaagagagaaagaaggaatcacaaatttattattatgatcatattttcctgtctccaggaccccttgtattcttgtttttcttgaaggatctgactgtttcacagcaccttaaatcttactttgctattgatagagaatctgcgaattatattgtctgaggcatcataatgacttgtcctgggttccctgtatctgcatggctccaggtttctgtcttatgctttatgcattcagtacattcaataaattgtaatctggcacctcacatgaggtctctgttaatgatatcaggctcatcaacagcctcttcctccctccccactccccccaatattctgtcttttctcctgtgctgatattattgcaccaacttagaatgcccattttcttcctctttgctgggccattctttacagtccagagttctgcctatctcccagattctgggctcaaattggcttttccattttatgaactattacaacactattcaaattatataatcatgttaattaccttttgttattccatgcaggtatctattgtctccctaactgaacagttgcttacacttctttatctacaatattatcagtgtctcccaaagttggcagaccatcagaattcccaggggaacttttacaaaatgtagattctgactcaggaaacagggttgagaccaaagtcctagaacacctagcctactgattgacatttaaataagcagtcagagatgctactggcagtgtatcagagaaacgttttgaaagcactgtgtccctaaatcccaaggttactaccagaattgttgcaacattattgtaacctttgagtaggctgcttttttatttgcatgtttgcttatgtatatacagtgtacatgacatatttatttaattacattttacagagacaagatgactactataatttttggctctctattttttttaacatcagttccagataaatactatataactttcaatgacctatttattaaacatgggatttaaagaacatgtaaaacacatttgttcttccctgtaaaatattaaggtgatgaagaatttttccatttctctgattttctcttgcagtgtagggtgtgcgatacatatttgctgactgaatgaatggttgaggtgtaaataggacaaccataattgtgtgttattacactgatggtaaacaatgtgatgtatacagaccttactgaacaaaccataaaatagaggaacacggcatttggggaaaattcttttaattacgcatttgaatattggtctttgggtcatttgagggacagtgactggtggcaggaaggtccacggtgacatgtggccttctagcttgattcttggccttctgcagcctctggtgccatccagaggactctctggaagcctcagagcagaggtccaagaggcctcatcaacagcaaccactggagactccagaagatgctacaggaatttcttccaattagagatgccacctgctttccaacaaagtggagaaaaccttccttcaatcaaaaaataaagaggtatttttatttctccacagtctggtcttcttgtgagtcagatgctccagtctctttggttcactggtatttcaagtaacaggtgagtcaaagcacagagactactgcagaaacatttgctcctggcttctgtggcttgtgttacaggaagagaagaggtgggacaggaaggggtggtaggttgagaatttgagattgtaccacaatcccaaactcaggaaacagggttggtccagagcgggtccaacaggctggtccagagctaatctaaggtaattccatgtctttgattcatgggtgtttatggaaacctgcagcaaatgcattatagttaagtccagtgtagcaggaaacttgatgttcacaacaggatcatatggaggctgaatgaggagaccaggaaaaggacaggtctctggaaatgagaccaaagaaatttaaataattatcatttccttaaaaaaataaaagaaagaaaaaaattgctcatcatatctacaccctgaggcgcagcataatcttttctttctagatttcgaatattctgccattcaggctttttgtaggacactcaactacccactttttgggagagggatagcatcagattatttttgtttttccagcaggtagcatagggaattgactccataacagttcgtaaacatttttcagcagtcctgacttctgctttgcaggcaaggccacatcatcaccacctagcagttaataatggaaatgttacacatcctgaaataagttatgtcttgttaggacatttctgtcctggaggaaatgaaaatccttttgtgaactcttttgtaactccattgtcatacctgtgtcctactgccaacacaatttccttcatgcctgaaaatttaatacatacttaaaatttaatatatgattatgtaaagaaaagttaagctttatagtcttccatttttccctagtgttctatttccttcaaaaatatctttatagggatcttaccttaaggactcgggtcaaatgcagcgtttgtaaaaactccatatgttcctaggtggctaaagaacagaaacacaaggatggcaacaatatactgcttagttctcgacaacacagtccaacacatagtatttccagaaaccacaaattaccatccacccttggaattctgctttagaaaggaaagaaaaataaatgccaaagaaatattcgatatcccacttaccagctctgggtaatttgcattgcattttgcacccacactaagttattgttcatgctttatgtactgaatacctgttataccctctaagttgctgcaacctcttctaggtgacaagaggtagttacaaaattcttggcattaacacttgataatctaacgatagttttcaaagggtgcaatatgacccctaggggtgttttttgatttttataaccaagagttcttccgatattgagtgggtatggggcaagggtgctggatgtctacgacaatagagttcatataaggatttccatgtcctccaggacggaaatgtctttaaaagatatccagcacccctgcctcctgcccactcaatgtcagtagaactcttgttcattacaaaaataaaaaaatacccttgggggcatactgtccctttttgaaaactattgctagattataaatagcaaggggtacaggacacaaaagaattgtccaacatcccacataactttggaatatctgctcgatattcatacaggttaaaaatctctgagcctggaactcaagcactttacatgtaaatattaagcatttttttgcatctttaaaatgcaattgccatatgaatcaaaggacaattatcacaggttttcagactctttaccggagttgttcaccatgttgaaaaattaggctggtgttggccacagttctaatgctctttgagtcactaatacaacattcccccatcagtccacctgcgtgggcgttgctttcctagtgattctgtggaaggtgcacgcttctgatgacctcattgcatctactggcacagcgcctaagtttttgcatcttgtttttattataaattacttttcattttattcctactttatattttaattagaatatttgttatctgtgtattttacttcagagtagaaaagaagacattgcaaaagacattgtaaaaaggaggcaggcattgcatgtaatcattctgacatattacagtgaattataaagttaaggtagcaaaatttactcaatcataaaacatttctaccttacctgtgaggattcaaggggcatttcccatcatctaaaatcagcaagaagacaagaatgaatgattaaaaaaaaaaaacaagatgaaagagagggtcattaaggatagaaattactggggaaaaccagtagactgattttcaggagggctcattataaggggaatattgggaacagtttctccctgaaaggtagaaagtgttttaggctaaattaaacattcgacaatatttaactccagagtcctgtcactttcttcctccttcctttcagtaaatacataaatcaatttcttttgagggcatcttgtgtcacttgccctcagcccttagctgagcaagctaatcacatacatgaatccaaaccaacagaacagtggatgtttttcctccctggtagcatatttttatccaaataacagactctcatagttgaattttcagctatggctgcagcattttcctcttatttggccatagaaaacttcaaagcctaaaatcaaattgggagaagctgaggaaaaaagctcccatccccaacaaatgaatgtatttattattaaaaatattggggcatgagtggccatttgtccttctccactgttagagggtcctctggaaatgtctcaaagtcaaagaaaggacttgggggaaacatcaagattagagtgattcctacatgatcatagagattaaggtctaggagctcttgcctctgccttctgggtttggttgagcaagcacacattttgcatggagggattcactgtagctctcagtacatctctttggtattgaagcagagtattgacctttgtctattgtcttagccactcacaggagagtatatgaaggaaatttggaaaaacagcctcaatgttttggtagcattgtaaatggagaaagaataagagtaaggaacacgtggttttgcctctgagcagttaagaataggtgttgagacctatgtcaacaatagagaaattcaatgagatctctttcagatattttaacatagccactttccattaccttgatttgagcaattaatggtctctctgatgcccccagttactttctatgaggagtgatgaagaagagccccattaggttataaacaaaactttatgaacttataggcaggctaagtgtctggagaagattgagaaaggatgttttaaaccttaagagatgggatgttcccatctttaattcctagactaaagttctttttctgatgaacagtctgatgaacacagtttcccttacagagagttttcatctatttggtcttctctgtttaaatcctgcatcaactttacaaattttcaggagaaaaagcaaatctcttagcttatcacaccaggtcaccaatacaggggcagcttcttctgcccctaacttcatctcctgcctcctccataatccccttttgattcagatgcactgaactgcgaaacataccatcttctcattgattttacactttcatgtctttctacatgccattttctctgatggaactctatttccattttccccttggctaaatgcctctcattcttcaaagctaagcttgaaaaaggctttctgacctgccagtctggtttaggcatccctagtctatgttctaataatacctaggttgtatttgtgtcctaacacacttactacacttcactaccggcactgatttcacctgtctcccctactggatttttccttccttaatatcagaaaccatcattatgagtctcacactctaacagagttgatgaataaatgactgctacatgaagaaatgagtgaagtcaggaagcataacacctttctaattagctttagtgatagcctagggtacttagaccagaggccccaaatgcaaaactgcaaagtagcctcatttgaattttgggagagagcttttgaaaaattcagatttccacacccactaccaagtctccccatagaaggatctatatttttaggaagttccctaggtgattctaatggacaatcagttctcaagatcacttatcttggctttattttcttttaatgcaaatgttttccaacatgaactactgaagttgtggtttttgcctccccaccctaaattacataaatcaatttcttttgatttatgtaaccaagatgcaaagagaagactctttcctatttacctttttgtctgaaacgctttcttagcaaagccaggagcgtcccacccattatcagacctatcgtagaagccaccgctccaccaaagtaagtcagggcttcctggatagtcaatggtcctgctacaaaacaaacacacacacatgcaagacataagaagtgtattatgcaaaagactagtctttctctcccagaaagttttcaagaactctaagatgtgcgatcaagtaggatcaccaaaggtcctgggaatgctgacaagctaacatgaaagaagatctggaattcataaatccactgcaacagaatgggaagtggggccttattttattcctaaggcttaaatatagactgtaatttccaaaggaatcagggtgaggacccaataaaagaaattaaattgtagacacaagaagcctatacatgtaagtatgggcaaataaaataaaagtggggccttaatttattcctaagacttaaatataaactgtaatttccaaaagaattagggtaaggtcccaataaaagaaattaaattgtagacataagaagcctatacatgtaagtttaggcaaataaaataaactgtgcataattttttggcaaagattcagttatgtaacaaaaggcagtcaggacaagctatgaggggaaaaaatagggggctgaaatataccttgcaaacagatggaatttaattaaggaagatctgctaggaggtttttagagttaggtggtaagcaaaggtcttctgagataataaattagaaatctgcatgaaataactcccagtttaaaacattttgaaacttcaaggtctgttaaacagagattataacgaagcaaaaggtttcatttcacaaactgaacactgaagaggaggggtgattacctacacagtcactgggtttaatttccactactttataaggcaaggagattctgcctgattcattgtgaaacacttattaagcagggggaaacccggggatggaaagcaagaccactatgagaaagacacagggaagaaacactgattttgttattttccacatcaaagtgacttcttaacccacatgaaaattgtaccttggcaggttggcacggtagttgaccagtggccattctcttggcatgctgtttgtgcagagccattaagtaactggccctctagacaatggaaagagcagattgatccataactgaagtttccccagaggttggagcagttcatcgctattggcttattaacatgtagttctgagcatttcacagctgcagaaaagaaataatgcaagagaaacaacatgtggattggaggtgaaagagattatagtttcttttgtaacctaacattgccaataaatgaggcagaatgtaaaaggtcagaaaggatatgagccacttccaatattcacagtagctcttctaacagcacatatatgaaaatattctctcgaagggtgatatccaaagaaccaagatgcaaagatggacacatagtagcatccgacaaatacctgctaatgcattgataaatcttgcctccaaatatactatttacaaaattttggttcttaaaatactgttagtctaaatgttattactacatttgtgatcaactggcatgtcagtatgtgtttattgaaatacttaataagtgttcagcatatctggacactggaagtttgaaagaagtagactgtcatcctccttaaactacattttcagggaacttcagggttattctttctaatttatggataggaaattaaaggtcaagaaattagatttaattcaaataaatgttatttatcagtagtgacatttgcaaagcactgtgctatgttttgtgggggatacaaaaatgaaagaaacataggtctcaatgctttatgtgtagggcgatagctcttcaggaaatatcatgtatggcttaactttttatttaggttcaaattattatgaaaatatggaatgtttatactgtcacataatatgcaacttctagtttaccaatttctatagcaggttttacatttaatatgtctatttttctaacacatcttggacatctgcaaatgtttcttcctttaagtctctgagtacttgtgtattagctttagcttgtgacatgaggaaggacagaagtgaaatgcctgtgacacattacttctaatgggattggtgtggatttcataagggagatgacacttggagtagtggttgtggttgggtgagacttcaacatacaggcacaatggctagcttgagtacttgcaggaaggcaggttcagaactgcctgctccttttcaccttacctctgcatgctggagttactgctgtccattgtcctgaaggtctgcagctgagagtgctgtctcctatgagtgtgaatccagcgttgcagccaaagtaacaagtggtattaaaaccaaaggttcccggatgatgcctacagtacatggttccctgcccaggagtggtgagggctggacattgcacccctggagtaggaagtgatgctatgcctgttgtgagaaaatgtttccattcagagacctcccaattaaaagaagcgttaacagagttaaggctaatctggaataactgcttttcactcccttcataacaagggaggctcctgcaagagctatttaaggaagttaagaaaaactatcagtgtcagagatagaaaaccagatgaggaaaattattaaaaatcatccttgaggagatgattctcctggccaagagaagaaatcagaggagtcattgttgttgctattttaaaaagaagcaagaaatggtacagaaatataagaaattcagcagaaagccaaatatacatgggccaactgcctgcccaaccctgccttattgggaaatggtactgttctctgactaaaggtcaatgtgaaagttgaaatttactgcaatgattgctttctgtctcaaactatttcttccatttgaatgatcccaccagctttgtcattaacttgccatgtggcaggaagatgatgattgacctctctgcacctcaattcctagatttgaaaaactggaccagtgactctaccccagtattgtctgtttctctcagcaataaattaatggagaccattccgttcactcaacaaagctctttcaaaaaaagaagccatgaaacaaaattcctgcttaagaatcaatataccttttattcacaaacataaaaatatcctgtcactccttagacattttaaaatccttcagctgtttgctaaacccaaataatggtaatatatacaattatctagttcacatataagaactagataattgtttgttgttgtagaataaatttccaaaagtagaactgtcttagcaagtacatattattacctttgcaggttggtggagtagctgaccatcttccagaagttgtgcattccacattattgggcccctccagcttaaagccgttgtcacaagagaaatggcaggtggagccaacattgaattctccacgagtgtcagaacaatccaggctgccctgctctggggcaaagagttctgggcacttgatggctagagtatcaaattaagagtgtcacaatctccaagtttattcagaagttctgtgttacacaaagttcattcacttatatattcaaaaaatatttattaagcacctatattccaggtattttgctaggcagcagcattccacaacatatcatgtaggtcatttgctgcaaagggcagtgggaggatggtaagcttacagagaagagtataggtacaagtcacgaagacaaagaagtcaaagatttaggcagccatactcaagaacttacaatgtcaccctattttctctacaccctctgcttcagagacctcgtagcctgccgcagctccctctatcttacttgaatgggtgcaatccaggatttcatttccgcccttcctcttgcctgagactacttgctcccatatatcatgccatcttctcaaattcaacacacctaaaactgcaatgattgctttctgcctcaaactatttcttccatttgaatctcctcactaattgttttgtttattttgctgttgtattttaataccacccatccagataacacaggaaaactcaaaacctcctggtcaagatagattagtttcttggaattccctgaagtgactttgtgtgttattgcttctggttcttggctcacattcccctgagaatttttccacttttatggcgtaaaatcccactaatcctccaggatttaactcgtaaagtctctgaagactctgctgatcaccacagcctgaactcttctcctctgaattcttcaactttttgtctgaactgatgtgctgtcatgtcccatgtcataccctcactcttctactggatgggaaagtgtctaaaacccaagaatgattcatccttgagtcttccataactcccatcccaggatctcaagaggcagtgctcagtaaccacttgccaagtgaatgaataaatgaatttaaattttaattcacaatttccccccaaaagtatttttacaaattattgcagttacatattttcttagcattattcttttctccccattaattctctaatataagactattatttatcaataaatgttgggttatagacaaatgaagtgactattctttctttaaatctaaggctattctgacaacaataccttggtcagataagtctcatttacttagatagtttgatttttacaaacctcttcaagacctatatgctccctcatggaaaaccaatgtacagtatttggcttttacatactggcccatgtatttttcagtaacaagctattcattgaaggattatggattcttattgcatgaatccattcaaatagccaaaataacacagtgaatttcagttcagtactctcaaattgttgagtaattaacaacttcatatctgacacatcaaatcaatttactaaacctttttgaaacatgtctactggtgtaactcctagacatgaagtcatctgtgaacattttcacaaaaataactttttcataatctcccagaattacaactttaaactgaagaatatgtataatgtcagctgcaggaaagcagggaccttgtcagttctttgaacactgtatcccagagaacagggcctgacacataggaggggttctacaaatacttatgaattgaatgaatacagtaatgaatacaatttaatttaaatgcattctaaaaggtatgcctacctggtttgaaaagaaacaagaggaattactgtttttaaaaattaaccgaagggggccctagtataaaatgagaactactacagcattaaattcatttgggggatagtgctttggtttcagtcttatcagtcatgctcagccaaggttacatatccagactttcatatttataaaagtctctgaactctctcaggtaaaaattaaccttgacccttacatactaagaatttggctctggatcatgtaaagaagtgggtttacctgtttgaggggcagcctagatgagttacatggaagcctaacccagatccggcatatggtgggcactcagcaaacatgggatgaatgacatttgtggagttatcaaggatgctgctggaatggagattagtgcagatgcaggaaaagagttatacccaggaatgacttttgtgcataactttgagaagtggtcatattcttgagcctactctaaaactttggcaaaaaaaaaaaaactcctgaataattacaaaaatagaaaacagataaggtttgcatttattgcacgcttagtgttctattttcactgactaccaaggcagttctatcacatatgggtattcattggtgttcttctatagtccatcaagaaagtatacatgattgcatctgaattcttaaacatattgatttatattatttcaaatagatttagtaaattatctgtttcctttcattatatcattttacttgagtttgatagagttttctcaataattttctggaaagaagatatagtatgaataataaatgtatctgagttgaatattgtaaactcaaactttaggaataaaactaggaagccccacagattcagagaaatgttgggggaatgaagaaaaaaatggagatgtcagctgggccagagttttagggggcaccagttcaccatattttaggacgtgagtaagcaggcacatggcagaagagcagagttgaggttgggacttggaaccaggacccctccccacgcagtgaaaatagacattaggagttgggttcagcagccaaacatggtcaccagaggatcaatgacagacagtgttaagggattaggaattcagcagtctgtatcatgaaagtggtccaacaggcagggacaggagggatacggaaactgtgtacaagcactccatcatgcaggtggcatcatcaaagttggcacaagaacctcaagcactgcttaggctcatgaaaaggacttcaggtcctgaagggcaaaggcagagacaaggctgaaaaataaccgactctctgtatccaagggttctgcatctacggattcaactcgttgtggatcaaaaacattcagaaaaaaaataaattatataaagttccaaaaagcaaaacttgaatttgccatgtgctgagtatgttgaatccatgcagatgaagtgatgtgtaggctttgcattaggtattatacgtaatctaaagacggtttaaaagtctaaaggagaatgtatgtaggttatatgcaaatattatgccattttatataagtgacttgggcatctggggattctggtatctgcagggagtcctggaaccaattccccctgcagatactgaggaacaactaggcagaggccacatcccagagggcccagggaaccggcattctaactaaagtggaactatcggtagagccatcccccaaaatgaaatctcacattgcactctgaagagacagcttgagaactccacctgccacactgcctctgcttacttggaggcccctgagtccatctgatgtatcctagaactctgcaaaacaccatgtgaaaattggggttctagggggcagtgctgagggttaaaaattaatgggttcaggcatatgggaaaataagaggaaccatttgcctaaatttagagcataaatttggagaacgaagaagaaacacaaatgcaaaaaccagggctcaagatcaggatcagtcaaggttgataattccaagggccatagtgggttaaagctgctgttcatggtcagggttgggtcttgacagtgagtggggatggggcctgcaaagtgggaggcaaatgcctcctcctgcagagaaaggggggctggaaagtagtgaagggaagcaagggctttagagattacagatttagcagccatgttggttgcctacatgatttaaaatgtgaatgagatttttaaaggtttttttaaatattctttagccttaaaatgtgggaaaatagaacttatgagaaatgtcaatggaataaatgaataagagagtgaggaataaatgaatgagtgaaaaaccacaagcccaaatgctttcctccatacatgttctagaattctcagggaacttgtagtatatctttttgacagcagatggtagcattttatgtctttcaccctacagaattcttgaccagggaagcgacctcaaagatggtctggtccactcttctccttttggaattgagaaaacgggagcctaagggtgtgacaagactttcctaatggcacatgacttggagagagagcaatacaagtctttggatattaatctagtgctcattccacaggaaggaataaataatattttagctgtttttgtgtaacacgaatagatttctaccaacatattctctcatctgatcaccaggcactgccatttctaaagttcatttagcagttatagctgcaatctgtggagtggaaaagagtaaattcacaagtgacttacctgagattcagaagctctgccactgggtgatagtgtagttcagtggtcaaaacactagccctataatcagactaggcctgggtttgcatcctgtctccatacttcaagctatatgaactttgctagctacttaacctctcaaagcctcagtttcttcacctttaaaatgggcatagtaataaccaacttaagggtcatttgtgtggattgaatgtgatgatgcttatgaaataggtagtcctacattaagcaataattattaccattatcactggtctcattattactaactctacactgaacaatacattagaacaatagcaccttttgcaactaaacaggagctatgaattaattaattcagtgcacttctattttagaacataaaatatactagatactttgccagccagatgtctcaggggaattaaagacagataagatctggcccctgcctttgagaattccactaaattaccaaagcttgtgtttgagtaaattttactggtaaatgatcaccttcaattcaacagatatttgtcacacacacccatttttattctgtctagctgctgcagggggtataaagatgaagaaggcacagctcctgccttcaagaagcttatattcaatatagaagtggagagaggagggaagtgcacacatagttatgctagggttaaatctcacccatccctaaataaggtctgtggctgggatttagtaatgctcagttgaaggtgaatgtaggaatgaagaaatgaagaatgtagctgaagaagactctgtaaggaagtaaaactttcagtgacatagagctgagccttttcacttactaacagtgtgaccctggacgagttatttaacctctttaagcttgtgtctcttccttatctataaaatgagatgatactgcctttccttattattttagaattgtggtaaacaggaatgctataatgacatgaaagcacttcctgaaactgtgcaatttttttttgagacagagtctcactctgtcaccaggctggagtgcaatggcacaatctcagctcactgcaacctccacctcctgggttcaagcgattctcctgcctcagcctcccgagtagctgggactacaggcatgcaccaccatgcccagctattttttgtatttttagtagaaacggggtttcaccatgttggccaggatgttcttgaaactgtggaatatttaactaaagctattaaaatattatttaaagagagggagaacttttttatctagattaccattgttgtggagagtgttgtttgcttcagctcaagaacacttttatataaatccctgatgattctccattctctgatgtcatctttaaagccataagaaaggacagacccacagcctaccttcacacattggtggggagtctgtccagcgtcccgatcgagtacaatccaatctttctggtccagacaaagaatatccctcgtcacagatgaattgacatgtggatttataactggaacttccaagaggttgaacacaggtcattgttccattctgagggcttagcaaaggtgtgcagggaatggctatcatgggcatggcagaggagaaaagaagagatcattttataattcagcaacctgaactctgtaactctctctctctttctccctctctctctctgtgtgtgtgtgtgtgtgtgtgtgtgtgtgtgtgtgtgtgtgattaatatacaacgatggtatttggctaaaagtgattgtttgaatttcatgatgcttcatcaccagttagagattgtagaggtgtaaaatagcagcagcttacagttgattgacatcctgaagtgctcaatcacaaacagctttagaggtgatttttaaaggaagctggtgctctgtttgggaggatagtggtgcaactcatttttgttgcttctagacaggggtggaactggtttctcccttgataccttcttcagaaacaccccaatgaccttaccagaaaacaatgacaaatgattggaaacacagaaatggaggaaaatactttcttccccctttcccaaccaagtggtggaatctgcgcccaaattttggctctgttacttgctagcaatctatcactagacaataacctttctgagcctcagttgctttatcttcgaaatgggaaaaaggaaaatccttgcatatgtgccacattttcttaatccagtccatcattgttggacatttgggttggttccaagtctttgctattttgaatagtgccgcaataaacatacctgtgcatgtgtcttggtagcaacatgatttataatcctttgggtatatacccagtcatgggatggctaggtcaaatggcatttctagttccagatccctgaggaattgccacactgacttccaccatggttgaactagtttacagtcccaccaacagtgtaaaagtgttcctatttctccacatcctctccagcacctgttgtttcctgactttttaatgatcgccattctaactggtgtgagatggtatctcattgtggttttgatttgcatttctctgatggccagtgatgatgagcattttttcatgtgtcttttggctgcataaatgtcttcttttgagaagtgtctgttcatatcctttgcccactttttgatggggttgtttgtttttttcttgtaaatttgtttgagttcattgtagattctggatattagccctttgtcagatgagtagattgcaaaaatgttctcccattctgtaggttgcctgttcactctgatggtagtttcttttgctgtgcagaagctctttagtttaattagatcccatttgtcaattttggcttttattgccattgcttttggtgttttagacatgaagtccttgctcctagggtcatttttcagccactgacttaaacagcatgaggtttcaagaacactttctacgcctttctcttcccttcattccttcccctctctagctacattcctttcaatctgatcaacttgtccaaagatctggttcttttcttctagttgaaaagtatttctgtagtaagtgtgtatgtggggctggagaggacacaactcaagaagcctataaactgcaaggacttatgggggaaagggtgtgggtgaggatgttggtaccacagaacccatttccagctcttctgtggctttgccttctgacagcaggggtagatgtggaggggtgggaggacattaaaaagggaaattgtctgataacactctctcagaagtattacaacagcgagtggattgcacactgcatggtaccttcctgcccagcccacatttgggtatttcacttgatgtgcacccagcaacaagaggagaaagttcagagtaaataaagaactaaaagcagaagggaactggaaggtcacaggaagccgtggtgagtggcaacctccttgctgtgaaacacccagaggcaggacagtatggagcaatgaactgtaatctgtgccctgcaccacccaggcttgcctgtaagagtttcaatcactgtgatcactgtcctcagggattcccagttcttcccacaacttccccaaagttgtgtggactttgtgatatgtccagacttcaacgtagccaggatgagcacttaaggggcaaggtcacagccccgccctgttctctccagacccagctctgaaggtgcacccaaccctaagtccaggggcttgccatcctctctggtgcctggcgatgaaggacattcaattctgctgtttgcttgtccatttgttcattcattcattcattcattcattcattcatttactgttgacctagcttaacaatggggtgtgtgtgtggggggtgtgtgtgtgtgtatgtgattatgcttttgtgtgacctgaatagtgagtggtttccttttagtaaaaaatatgtatctgcccactttcactcaaatgttgaaagtctatacaaagtgaaaggtatggcaaataatgtagaactgtctagtcttttacccattcaactttattgttaaaattgtatatacatcataaaaatattaattgcataggaggaaaagcggagaaaatattggaagaattcataccagaagcctaacagtgtctattttaggataggagtatttaagaggatatttcttcatttctttattatatttctgcagatttttataaatgaaaatcttgcgtttaaaaagcagcattgtctataaaagttaactaaggaattggatacattgagggggaaaaagcttggggaatataaaaaatatacgtctatccttcaattcacaaacatggatgactagaacccgttcaagttcatacaagatgttgcaatactgacagagcacactggcttgttaaatatcaagtacaaggccgggagcagtggctcacacctgtaataccagcactgtgggaggccgagtcaggcagatcacctgaggtcaggagtttgagaccagcctagctaagatggtgaaacctcatctctaccaaaaatacaaaaattagctgggtgcagtggtgggcacctgtagtcccagctactcgggaagctgagacaggagaattgcttgaacccgggaggcggaggttgcagtgggccgagattgtgccattacactccagcctgggcgacagagtgagactccgtctcaaaaaatgtatgtatatcaagtacaatgcagatagaatgtttatactgaatccacacatttctttcttctgagaatcccgtaacctccagtatacagattagtttttctcttttttctatcactcttcaccttattctaagtctatttctccaattttatacagatcttggagtgtttgcaactgggtacttgtaaattctgcccctcccattttaccattataccctgtggttcctagaagtgccagaccagccttgggacaaccactctgaagcaatttttttcccacctggtcttctttccagatgccatgtttggccaggtgagaagagtttacctggtttgtggcaggagccttcaggtctgggtaaagaccctgataaggagttagcaagggccatgccctactgtctatggccagacatcctgacacttgtgtaatctgcctatcccccggaggcatttgcatttgggatccttgggttataggacaagaggatgagtgagagtatttatgaattttccagtccatttcaaggtggatcttacatagttgtcacctctaaaatccagcctttaaaaatactgcctacaatttatttccatgatgttagaaagaatacactcttaccttggcattctggaggaacagaattccagtttccagtagccaagcactgtagcacacttgctcccaccaggagcaagccttcattgcaggtgaagctgcagactgactggtacctaaaggcaccgaaggggtgggagcagttcacccgggcctcatttggaactgggagatcctggcactgcaaagctaagggatgaggaagtaaggaataaagaaacagtaatacacatgtactcattgatttttgaccattaactctttctagtgtcaagaacagggattcctgaattgggcttgtttaacatagaagataagaaaaagtgtcatttaattataacggcacatgaaggattttattaggaaatgctaaacctttgttgagcatcttggcaacatgtgtcaataatttttaagttatcatgcttttggacccaagaatttatgctaagtatgtaatcaagatgcataccaaaaaatctatttagagatttttgtgaagacattatttgtaagagcggaatattgaaaacaaacacaaatgccattaattgagggtggaaattaatgatggtggatccatgaaaagaatgttaaaggtcactaaaaataatatattttaacttgtaaagataggagagaggtctcaatgtatgatgttaaataaaaaatcagagtaaaaattataatatacaccatgatctcaaagatgtaaaataaataaccatatacgaagagagcacacatattccatgtgttgtctcttctcatctttaaaatggtagtaataattgtaactacctcatagagttagactgagatcatagaaagtgctcaatgaacattagctgctatattagtagcagtggtagtaatagatagtaataatatcattaaggctttgcgtcacatgcagacactgagttcaggagtgggaaacattcagaaggcctatgaagggggttagtgagaccacatctctggatacttaagagaatatccaactatcttttcttgattagacatttaccttcctggagacaacaatggcttgaataatcccttatgatccgttttaagtgtgtcaaagagctcattgtgtctttttctcccagataacatatacaatacattccataactcagactaagtgtcagcatcatggtgtatagccatctattctattgccttcttgttttttctttttttttttttttgctgttcaattttttattatagtgagatatacgtagcatgaaatttaatttaccatttaccatgtcaccaatatcaagtgtacagttcagtggtattaagcacattcatattattgtgccaccatcaccattattcatctccaaaactcttttcatcatctcaaactgaaactccgtatccattaaaccataactccctatttccctcttccgccgagcccttggcaacctccgttctactttctgtctctatgactttgactactctaagttcctcatatgagtggaatcatacagtatttgtcctttcatagtggcttatttcacttagcataatgtcttcaaggttcattcatgtttgtagcagaggtcagaatttacttcctctttaaggttgaataatattccactgtaagtatgtggaatactttttacttatcctttcatccattgatgggtgtttgggttgcttccacattttaactgttgtgattaatagtgctatgaacatgggtgcacaaatatctcttcaagacctgctttcaaaccactgcctcattttaaaatcaaggtatacttaggaacccagaggagtcacatagattgctcagaggtctccgtaaatgaaaacacaaaatgtcaatattacacttctggaacatgactttagtgtgaggtactcctcgtaaaaaaaataataatccttgtgaaccaccacacccgccccccatgagtgccttagtataagagcaaaagattagaaacctaacatattgaaagaggatcattttgtcaaatcagaccacagacatgtgatttataaggtaacatgtcatcatcatcattttccctataaatcctataagagttttaaagttgcgtttacacacattaattcacaactactagtgaggcaggtaggtaaggctgataatagtagccccattttacagaagatactgagcctcagagagtctaaaccactagcttaaggacaggaagtgacaggactgagctaaacaccttgtccattacccttccccatcccatgctattcctcatgcatgatttattcccccaagccccatcttcttcattccaatgcaccctatatgtgtcaatcagtgcaaacctcaccttgactatactatagtggacatgtgcctaagactggcttcacgcaccgtttcatctcatccctggtcccaagcacaaaggacatggcccatagtaggttctcagtgaatatctgataaagaaaggcatgccaatgctcagtgcagatgctgatgcctctaacgagctgagacacacagaaaaacattaccactgttacagtaccttgacagactggggctggtgctgtccactgtcccaagttatcacaccgaactatatcggctcctctcagcatgaaaccttcagcacagcggaagctacagttggtgtcatactgaaacgctctcaaggatggagagcaatccatgcttccgtggacaggactctccagcggctcacacgaaatagctaagtggaaaaggtatcttctaaagccaggtaatggaagggccgggttcttcctcagaaaaaattcctagatgctatatctttcctgtccacattttcagtgtgttcagaaccctaaaacctccattttccaaaagagagactgcctggaacaccttcccatgcccctcttggcctgactcactctcacctgcccttcaggtctcagcttagacttccctttccttaggaagccctcccttcccaccttaactaagggtagaagcccctgcaatgtgctcccacagcctctgttcttgcgctgttcatacatgattgtcattcttccccattataccgtggtctcctcgaagttgggctcagtcattcatagttttattctggagctgagcagagtgttttgtacattgaaagtgctcattaaatattgacattatctgtgaaattgaacctgaaaagagtatatacaggaaaatgctggacttatagggaaaaaaaaaaaagctggactagcatagcttattgttgacactgttacctagtcctgtaaaatgatcctgaccgggctttgtctctagaacacaggatgtcatcctaatcagacttcagttgccaagtgagtgcagccaaagtgaattcctgagcacaattaagccctgagtgacctcagttctgataaagattggtttcctcatgctcttccttgataaagcatttcatttccaggctatttctgaaacttttcaaagtgtaaagactacctctttgctctgggctttgacctctggtttttacagactcagagcatttaagaaccaaaaatccggctgagcacaatggctcacacctataatcccagcactttgagaggctgatgtgagtgaatcacttgaggtcgggagtttgagaccagcctggccaaagtggtgaaaccctagtctctattaaaaatacaaaaagttgcctgtaatcctagctattcgggaggctgaggcaggagaatcgtttgaacctgggaggcagaggttgcagtgagctgagatcgtgccactgcacttcagcctgggcgacagagtgagactctgtctcaaaacaaacaaacaaacaaacaaacaaacaaacaaacaaaaacaccaaaatcctctagtgtttctctcttctctcttatgttttaggcaagaaaagtgaggttcagaagtgttaagtgacttctctaaagtctcatagctagatagtagcagggttgggcttgtcatccaggtctgggaattcactaatctatcgtaaatttcctattctcccattaccactgtccgccttataaactgagggtgtgaggcaattgcagagaattcattttggcggaattatgtaattgcctgggattgcatcacacactttttcgatgcagtgttccttcctttgcttctttgtcaaaggctaccctcaaagactacatggtgaaccactctctttagccaccttagccgctgctcccaactccctctcaagtataggacatggtcctatacctcggatatgtcagtagagcagaagctctatgctaggtactttatacatgctatttaattgtatactttttatgtacttaatcctcacaagcaccttgcaattcttagctccatttcacagatgagaaaaccatggttcctggaggttgaagagcttgctctagtgcaagaacttagaagagatcaccccgacactgagagcccttggcctctctaccatgccatgattccttcttggacagaatggaggttgctaatgaaaaatcctaccctcacaggttggcaagggtgcagaccagtgtccagagtcaatgcagcggagcatgtccaagcccctcactctgtagccgggctggcactcaaatttacagctggagccataggcaaaagcagtgagcggatgaacacagtccatggttccttcactgggggcttccaggtgctgacactgcacagctggagagaataaccaaggataaagagaaagatactgagaaaggagaaaagccacacagagagcaatggtggaaccacctctgaaatgcaggtggagctagcaagatgtaaaggtcaagagaccctaatgatgtttgtccagacttggattaccagttcccagggtgatctgagtctgttaaaaacaaagattcctccaagctgtattcttaatgtcctctattccctatacttctataaacctgtctcagtaggtcttctagtgtccacttatagatgtagaggccaccctttctaatcttatggggaaattatgaatgaggccattctgaaactgcctgcatttgtgtttggggaaagaaaggaatttttttcctttctcatctcagatgaacccaatctagctgaatggcaggtaggaagagaattaaattttggcaattcaggccagcttctccataagctggtcaatttcatctatgcactaagtaaggactgggtgcaatggacattatacatcccaactacctgaaactcacctttacacactggggctggggctgtccatacccccgaggctgtgcattgcaccacttccggtccaactaatgcaaatccctcttcacaactgaagctgcagctagactgatgctggaatgcttttgcagaatgaaggcaggtcatgtttcctcgttcaggaatcttcaggggtgggcactgggcagctaaaaccaaccacagaataatagtgtgagtccttggacaaattttgtccatcaccttggaagccttcaaattctgcagcagtcacaccttcccaaagtggcaggcaggttgatgcactagaatggttaaatggtgttttcaatagctgcttggaaagatcaaacacccttgtttttcatgtagagaagttaggtaaaattatcaaattaataattcttaacccctaagtcctcatcattgtactctgtttactttacaattaacaaagggaaagaggggtccctttgtaatgtttttgcctgcgaatcaacaattaaactgactaagtcactctacccataaaaaaataccatgaaaattgaaattaatgttactctggttgacagttaacagtgataaccagagttttccatctaacctagatggtcattatttctcacattttttaatggagaaagctcattgtgtcctcttctcccccaaaattctatgtcagtgaggatgaaaagaataaggtctacatacctaaacactgtggaggcttatttgtccagattccagaagccaagcattccagcttgctgggcccatttacttggtacccgtcagtgcagtggaagctgcactgcgagttaaaagagaagtttcccagagggtggctgcagttcatgagcacgtgttgagggagctcaagttctccacactctctcactgcaggagacaaaatagtgatttttattttccatgtagaattaacagcaatgtcatgtttgctgaaagctgtaactatttgtgtaaccctcttaactctaattttctaaacttttaacccaagctatccatctctacttggtctctttgtattggctgcatcttgggaaatagtcattctttcacaagtttttacttcaaacaagtaaaattagcctgaaagttctgttggttttgcttcctttccctttcccttttcttttttgaaatttatgagtcaatgttttctcccaagaataaaatgtttttacctagagtgtgtgtctagggacactgagtggaggagacagatgatagaggggggctggtaccatcctattctcactggagagacttcaacatgatttatttacttcttggcatcatctctagcataaaaccaaaataatatcaacaaaaaggaagcctcaccgtattcacattctggcccatagaatccagggtaacaggagcaggtgtagttcccgatggtctcgaggcactctccttgtttgctgcaggacatgtcctggcaggaggctgcatagatatggaaaggtcagagtcatggacattcacagatgtgaggaaaggctgaattctcgttttgaccacagactcatcccctctcagataggactgagctagccagacaagagggaagcacagtatcttctagagagccaacctgtcccttgtgaaaagcattgtaggggcctgctggagtattgcgtggctcccatttcatactgcatttagtatttcctaaggagggtattgttgtgtgtggacacagagggacaaatggagccaatgacagatgtgtggacagagaaaccctatgtggtacaaaatgggctgtggttttcaaaccaagcattgttttattatggaagcccaatgtcacgtattactgcattgaggttaggcaccagatgtggggcgtggggtcacacaggtgtgatatgaatcctggctctgctgcctacttgctatgtgaccttaggcaagttacttctctgagctcagcttgcacagtgttagagcccaaaccctttcacctttcatttgcttcaaatctatgtccagaatcctacagtggagaaacagaggagccaaatgagatgtttaagacgtactcatggtaaaggacaaacaatcttatgaggtgatgtttcatgagtctgaatacagcaggcgaagagagtactgactatggctgaactgccatgtcctcttcaccaagatagtgccactcaggtgacagaatagagaagggccatggtttctttcctgcaagaaagtattttagggtatatgcacttgatgagaattagtattagaattgatactttcaaagcactgagatgtttttattaatgaggtcatagttgggggtaagttctatggctgaactgttttctggtggttacttcctctgtcttaagccctgtccacatgctggttcacttggaagtatattacaaaagaatatccatatgtcatatgtggatatgctgtgctacatgatctctatgtttcctctcaattctgagatactaaaattctataaaccatgcaaggttctataggaagaagttcctgtggcagccagtgaatttggtgaagctgcactgagacactgggaagggttcaaataaagagaagatgtaggaggcaatagcagctaaatggatacaggtttggtccacatcctattcacttcgctccctgaccttaaccccaccaatgtcttaataccttacagtagcaacccctgcctgccctatgttcttggagcatacaaatgtttccccaattatagcttccttgggatctcagaactctaggggaaaaaaagagacaatgttctgtattctatcccatttcagggtttcctgaatagataggttagcaatttgtctattcctttggatctccagggagaagatgatttattcatgatgattcaatgaataaatcttttttcgatagcctgctctgaggtctaataattcctgacatgtggagaattattccaacaatcaaacttaatttcatattacagtaaatatatctatttctcatctcccatggataattgatgcttctctacatcctttacatcttagatggcaaaacgacaatcaatggtagtggctgcttagagtactgtgttggtggagataaaacccatctgtgttcaggtaaagttgtattaattagtgatgtctctaccactgttgtgggttagaggagtgtcatcatttatgccagtaattttttatcttttttctatcttgcaatttttttggcaagctttattgaggaagactgtcttgcagaaatggattttgaaggttgggtgtgaaggggaagtagtggcatattgaaacagctagtggcagtcaaggttatctgataagagataattctagggaggcatagcccagaaaggggtagagagctgactgggagagcagtaggatgagctaatatcctggtaatgtccatcctgatccatgaatatatgctcaattaatcaatttatttatatataaatgcattatttataaagtagatctgattatatgataatgcattcatggatatgttttgcctcagctaggaggcttggggagaagagggacaatgtagaaggcttgctttattctgtgtattctgttccatacctgtactgttgagggcttctgagggagaggtgtttaaaatctaaagaattcagaatatgtatggcagatgatttatcaaagaagcttcagagtacttagaaacttcctgctcggggcagtccataccatccttaggcacagtgttcgtgtgctacaaaggacagaaccggcccctctggacagggaagcaacatcagaaagaaggaatcagctctgacactaggctcgtgactagaggaagaccaagctttcaggaatgtctgcttactctggcactggtaaagttgagaattaaaatacactcgaagtatttcaccttcaattacttctttcctttcctgcccactccccaccactaccctcccaccaaagttcaatggatctaaagatatgttgttgttgaagagaaactataaagcatttacaatccttggttatattctcaaattgtctcataaaaatgtagagcaaagaatgtggtagtttacatggctaaaaaacaccaactttggaatcaacatgagtgtgaaactggctccaccatcaactagcttagaaccctgggcagattacttaatagctctgagcctttccctcatcagcaaagtaagagtaatagaaaaacctgactgatggagttgtcatgaggactaaatttgactaatattaaatgagcaaatgacacatgaactaaataaactaataacacaatgcctagagcatactgacattcagtagctattagttacagctgtgtcacctaggggcagggctaaatttccttccaatttacactctctgttatacaagacacaggggtgaaaaaaaagctctacacctaaaatttgggagactggtttctggtcctcactttgcttctgtcctgctccacggccttgagaaactaaaacctcgtgagtgtccttttcatcagttataagatgagacaggtgagctggatgatattaaaatttccctctagttttaagcagctagttttctctaattctgatcttatattcttcaaggtgctcaataatactgattgactaacaatttaccccttgatttcatgtcctgcctttgtatctttgtgttgactcggtggttatgttggccaaccagagaaggcagggttttttttttttaacaggaaagtttcaaagtagagaaggccctacctgtgtaacacaatgcgtgctttttcttcaagcagtgctcatcattccacttgccaggggctgacggactcttgatgtatatctccacgcagtcctcgttgttccttttgttgttaggttcattatcagcccagttctcagcctcgttggtgagagcctttttggttcccacccatgtccatgtcttattgttctttcggatcccaatccagtagtaggagctgtagtagggtaggaccttattgaggtaatcaatttcatttttattctggatggccactaagtctgtgtagcgattctggcagtatttacgggaaatattccatgagtatgcttttgtgctgtaatgataagtccatgctgccacttctttctggtttgttagttctagagtaaaggagagtgagtgccaggttagtacccctcaccaaaaaagaggccgtgatcccaagtatgcttctgcatactcagatgaatttccgaccagaacattaatacacaaaacaacgactagtttatgtctaatgtagttgtttgaaggaaaaagagtggtttccacctttcacttaaaagtgtgaatgatgtcagaataggaaaatgtcatcttctgaggatccttgatgttaaaggtttggaatcataagatatcaaagttaggagggaccctggaagtcatctaatttactcctgtccttttataaaagaaggagacataagtaatttgcccaagctcagattaaatgacatataaaatgtcttaagggcaagctctacctcttcacatggaaaataacatgctttatgacctggagcctaccagttggtccagcctcattgcccactgtatgtactttctcagcaaaacagaattcctacttccttgaatttgcacatgctctccccacaatcctggctgtcctctcttcttatgtctgataaactttactccacctattctccatggctttcccaggtggactctgtgttccttcctccaggctcccacagcacctcatccctgcctccattgtgctcattgccatgtacggtaatgtctgtttctatgatacagtctacatctgccaggttgtaaatctccgacggtgttttctttttagctttggatccttagcactgagcctagagtttagcacttaataggccttcaataaatacttgttgaatgagtgaaacacagtaggtttgtggcagaacccgggtgggaaatcagatatcctgatctgcaatcttatagtctttccattcttcttggctgtttgtctttcattaactactctacttcttccatgtctgaatactcccttattaagatagggctcagaacagccctttttcacaagtgtttttgataccaaatgaactaaagaatgtgcgtttcaaaagtataaaggtactacagcactcttatcatagtctgtgggagtccacccggggcaggagaggccatttcccacatgaagaggtgtacaaagcaagcaatcaggcctggaaatgggtttctttcctgtttatttaaaggcttgtttctatccaaccctctcctctgctgcctgcatgagggttagtcatgcttgtacctcccttgctgacatttccagggcattgttttgccttaaagacttcattctgatatagccagggctgcattatgactttcatagacttcaggcaactttgcctatgtaggcttcttcctccatgctaacatattaaaaattctattttgcaactgcactggtacaaagatgaatatatcactatatattaaaacattttctttgacttcaaagaaaataattataaaagaaattcagacgtgtgtgggtctttgaaaattttgtgcgtctgtgtctactgtgcctaatggatacattcgtcctggatatatcattttaagttctttcctatgccctttctaccaatatgatggcgttgggtacatttgtcttccagcaatctggacttggacagttttcccatgcctcaaaccaactggctacaatccttaaatttctcacacatagatctgggctctaccctaattacttaggcctaagtgaaaagttagcataaagtttaccagagatcagggcactgaagcaaaggagttgggaaattccaaagaccactctctggaatctctggtacaagatggctatttggcagttggcctgaaacaagaagagaaaactttcttttagtatccatacaccaccaacatggccaaaaataattctagttaacaatcattatgttgaagtataattgtgccaatttccactggaagagtggttcaagccctctgcttccttcttgcttctcattgccctgcttctaagttctaccctggatggacactgtagcaaggctggggacagagttcatttcttcattcattcaacaaatgtttattgagtagtttgtgccaccaatgtttttattttaagatacatttttaatgtgtatggaagaaagctaaacacattaatatggctgtcattattattataaaacaatctttttaagaagtggtatgtcatacccaagaataacagaaagtcacatgagaacttcctgacccacacaaataatgtctaacctatactttgaggtgcagagcatcaacaaattgtgttatgctatgccatctattttgtactatggatctttgttttatcttcttgctttttcatttctgtacacatctacaatactattcaatgtttaatatacatatgtatgtatatatttaatatttcttaatatatgcagtaaacttgttccccttggatctatagcaactattatttctcatgaactctcttctgttgggatttcatcaaatctatgaatatttttaaaatgtttttggggccaggcacagtggctcatgcctgtaatcccagcactttgggaggctgaggtgggcggatcatgaggtcaggaattcaagaccagcctggccaacatagtgaaaccctgtctctactaaaagtacattaaaaaaaaattagacaggtgtggtggcgggtgcttgtaatcccagctccttgggaggtcgaggcaggagaatcgcttgaacccgggaggcggaggttgcagtgagcggagatcacaccactgcactctatccggggcgacagtgcaagactccgtctcaaaaaaacaacaaaaaatgtttttgggcatctaagttctagtgatgctcatcttgtccgacttcctcatgttgcacatgaaaatactgaagcttggggcatctaaataacacgttcagaatgacagtagcagagcttgactttgaaacaagaaagagctctttccactgtacttttttttttttttttttttaaccttcattaacctccaggcttctaaatcccatgctgcattgctgttttggatgataaagcatgcgacatgaccaagcctagctgctacatcagttcccctctaaagccactcaacattactatcaacataaaaacagtgcatttgctatgcatttgcagttttgtcactatcccagccagactgctacctaaaacctttcctgtaaagaaatctcaaattgcctcagaccacaatttggtctgtgacaatttgctgcgaggttatgtgtgtgttcgtgtgtcatgccccagtgatggatgatgtagcgtgcatgggacggtgtgcggttgtgtgtatgttcgtgtgtcatgccccagtgatggatgatgtagggtgcatgggacggtgtggggttgtgtgtgtgtgtgtgtgtgtgtgtgtgtgtgtatgtgtcatgccacagtgatggatgatgtaggctgcatgggactgtgtggagttgtgtatgtatgcgtgtgtcatgccccagtgatggatgatgtagggtgcatgggacagtgtggggttctgtgtgtgtgtgtgtgtgtgtgtgtgtgtgtcatgccacagtgatggataatgtagggtggatgggacagtgtggggttctgtgtgtatgtgtgtgtcatgccacagtgacggatgatgtagggtgcatgggatggtgtggagttgtgtgtgtgtgtgtgtgtgtgtgtgtcacaccccagtgatgagatgtagggtgcatgggactgtgtggggttgtgtgtgtgttcgtgtgtcatgccccagtgatggatgatgtagggtgcatgggatggtgtggagttgtgtgtgtgtgtgtttgtgtcacaccccagtgatggatgatgtagggtgcatgggactgtgtggtgttgtgtgtgtgttcatgtatcatgtcctggtgatggatgatgtagggtgcatgggacagtgtgggattgtgtgtatgtgtgtgtcacacccagtgatggatgatgtagggtgcatgggacagtgtgaggttgtgtgtgtgtgtgtgtgtgtgtgtgtgtgtgtgtcacgcccagtgatggattatgtagggtgcatgggacagtgtggggttgtgtatgtgtcacgcccagtagggtgcatgggacagtgtggggtcatgtgtgtgcatgtgttcatgcacttttgactacagcctgaccagataccagggagaactcaactcaaaccagttaatgtgtcccagagagtagagttatctcataagcctagaacttttcatctgggagcttctgaatcttgactttggtaagtaggcatattttgtgttcttataagctgctgatctctgcaggacctatgattaaacactgagagtatcataacgttatgatttacagctgtttatttgcacaaaatgcagagtgatcgataaccctttggtgcgaacctaaccccactgctttctctgaattgtgttgtgtcacaagctgttcttcctatcacatttcaaaatgcaccattccaaatgctgaagtggaattcttcaaaccaggataaggctgacttcccaaggggttcacaagcaaagagagtgttaattaaatctgtattcagattctcaactttcacatatatactttcttaaaaacaatctgcctaaaatacacctttctcccactttataagagaaaaattataccttttactaatttcttatttattccagagctttgcctttggatataaatacattcgtatgccagagatgattcgaaatattggtataggtattaagaatttgaatattgtaaatgatattgcagcaaatccgttttcaagtctagtgatttccatttatttcctttcatcagctttgagggagcacccgattaagttgtcaagtctgactaaattttgatagtaaatcactatataatttggggcatataacttggaaggacttcaaggaattgagacattgctataataaaacttctaattccatttacttattcatatgaatgaagtttctcaatgtttaaatccttgaaaatgaaatatgggaataatattgatgccaaacttgtctaattttgttgataagtaatattcattcatggatatatgaacaaatgagggaaagctcctcctgtcttagagatgaatctttaatagcaatttaaatataaaggtttaagttacttgtcaaaacttgcagtatatttactttatttaattgtgtactgaaagtagttgtcatgctaactcaatagaaaagaaaaacattttaacacatagagacttacagttgtagaaaattgaaattttatatttttattttgcaaagaagtataataatcaagaaaatactttaagcttaaaatgtgtaatcttaggctaaatactgtagaagtgggatagaaataactattcaaggagagaaaaatgaataatataaaatttcttaagagcctgcttgtggtcttttaagtgatgaggattgcagatcatgctagtactttattccattggataaactttaagaaattatgtaacaattttatttttacagtctaatttttgtaatacactggaaaatccaatcttcttttgcttttaaaatttgggataaaaaattgtagctttccacttagaaaggtgtaagaggtaacatagtgttccaggatatttttggaggtataggagcaaaaatattgctgctgaagagcacaactctgcagccttcatgaaggggacctgagtgcttgcctttgaacctgggctttgctctattcagacagattgcagaaggagtgcaacgattttaaatttagtggtactcttcctgtggaagtggttttctccctgaacagagtatttctagggatttccctggctttggggccagctcacaagagtgtgtagggcgaaggagtcggtgaggctcccagtctcccatcacagtggccaaccctacccactgtttcctgctttgacttgtttgtttaaacttttaaataagatttggtttaaacaaaatttccaaaaagagatgtttcccattttaacctgtttgtttgtttgtttgaactttttttaagcaaaatttcatcagcaaattctctaccacacaagataaaacaaagtgagagagagcgagacaacttgttttaaacatttgaaggttttagaggactggtacagtgcttttgatgaaggcacaacatctaagaaaggaaaatgcaagtcagtgtgcatcccctgctttaatctgacgtacttttctgtttctatgcatcaccaaataccaagattcacctcttacaggttatttcagagctataggagaacataaaggtcacttccaagccaacttagcatttatctgctgttctgcaggaagtctttcagacttcgaatgcctaagatggggcagccaccactccccaccactgagactcagtgagcgtaaatgatttgcccaagcttgctcacatgaatgtgcatagggttaacacagttattcttattcttccagggcttatgaattttgaaaatctgataaaagccgtggtcagatttcttcaaaacaaatgcatgcttgcagtagtttagagaatctcagatggttcatgacctactaagtctgtccatgtttaatgtggcccaagttcaagattctgtgttaactgtaaggcaactgatagggattttgtgtggaggtatggagaatggatgatgtttaaaaatcttctttgagtaacagttttcctctgaaacctgcttggggtgggcaggccttctcatacctgctcctactctgcattatagtctgcaggatgctgctctgtcctgtgttactaagcaagttaaatactaaaacaagaggaaattcctctctagaagcatccacatgctctgctagtctttaatgttctctggaaggctggttcaactggaagttgctggaaaggagtcagagactgggtcattagaataacatcctgtgcctgtgtaagccttcattaagtaccatgattatctttaattttactttaataaagaactgggctggtgcagtggctcatgcctctaatcccagcactttgggaggccaaggtgggcagatcacttgaggtcaggagttcgagaacagcctggcaacatggtaaaacctcgtctctactaaaaatgcaaaaattagccaggcatagtggcacatgtctgtagtcccagctacttgggaggctgaggcaggagaatcgcttgaacccagaaggcagaggtggcagtgagccgagacactccagccttggcaacagagtgagactctttctcaaaaaacaaaacaaacaaacaagcaaaaaaactaataatgattgcagggtgaagagaaaagcagagagaaagtggaagaagcaaatgccttgacctaacttttcacacaaggaggtaccagaggctagtaggtgtcccatggcttgccacgttccaggtggcttacaaagttggcaagaatagtgccacagaaaggagatcttgttctttttgtctacattgtagaccacagctttgtgcttttagaaaggcggaatcaaacaatgtccctcccttgaccctttgtcctcctgcccacatctgcctgtttctctccttcctcttatagctaaactttcttaacttccttgcctcccccttactctccagcccactgcccgaccatcctatcaaagtgtccctgcaaacttcattgctgacatcctcattaccaaaccaaatgaagactttccacccttatcttccttgacctttctgtagcagtaaataccactacttccttttgcctaaaatgcttcccttagctcttctgttgttcttctgctctaatgtttgagaaacttttctgagtcttcttctgaatctacctcaatcctctgccttcccttgcagaggtaagtgtttctctaggttcccacctccatggccctattctcttctcattcttctgctttcctgggaagtaaagatgacctccttatggtcatctgtttccaatgtcctctaatcagcatctccgtttctgaatattctcttgagcaggaggtccacaatttaaatgcgcaacaaacatgtgagcatacagctgaggaagctactgacagaggcttctcaagggcaaggactattacttactcaggtctgaatccccagccatggtagggcacatactcaatactcaataaacattttatggataaatatatgaatgaataatggcagaggaataactgaaagtaagacaaaaatatgctaaataagaaaatgttggaaaaatacataataattataactgaatgcattacttttacagtagtgataatagctaagtgaacaaataaaatggtgaaaacagacataattccagtcctcatagaatgcacattctattggtagagaagacaatgaaacaaatactaataactacacaacagtactaaacaagtaaacatgaaaaatattaacagaatatagccataagtgctaggtaggaaatgaaacttatgtgatagaatgactgtgtcactatgttggtcaggaacgtcagggaagacctctttaatgagataatgtttaagtggagagaagaatgactgcaagaaaccagccagtgagaagcaggaagaagagcattaaaggaagaagaaaaagctatttcaaaggccttaaggtggaagcaaactgcagtgtgttcaaagaacatgaagacattagtgtggccagaatggaatgagcaatggagagaaaaatacgagccgggggtagtgacagatcacatcgggctttgggatccaaaacaaggggatgagattttattctaagtgcaatgataagccaacggaagctgggcacggtggctcacatctgtaatcccaacactttatgaggccaaggcaggcagatcccttgaggtcagaagttcaagaccagccttgccaacatggcgaaaccaactccactaaaaaatacaaaaattagctgggcatggtggcgcatgcctgtaatcccagctactcagaaggctgagacaggagaatcgcttgaacccaggagacagaggttgcagtgagctgagatggcactactgcactccagcctgctgaagattgggagatcctagaggttaactgaaaaggtagtttgagaccatatcttgtgggtcacaaataccagttggcagaagggatacttctgaacagagaagtatcatgaacacatgcacttaatggtggtatgattttttttgtggggctgggggacagggtcttgctctgttgcccaggctgaagtgcagtggcatgatctgggttcactgaaacctccacctcctggcctcaagtgatcttcccatctcagcctcctgagtaactgggactacaggcatgcatcaccacacccggctaattttttgtagagataagttctcactatattgcccaggctggcctggagcccctgggctcaagcaatactttttctttggcctccaaaaatgctgatattataggggtgagagtagtgcgatacttttttttttttaaatgagttacaatcagggagattgcactgcaaaagaagaggctattgcaatggtcccagtgagagttaaagagggacaggtttggtctggcatcagtgggaatgcaaataggggaggtgaatatgagagttgttgaggatgcagaactatacaacttgttggtagcaaagcccagatgttacaagctattacagctaatacattagttcccttatgtttctggacggtggtggtgttagtggtgtggcacagatattggtagcccagcttaggggtggaaaaagaaatacagtgagaaaagaggttgtctctaagccaaagagcaaattatgaatatagacaagaagggacccaggacatcaacacttagaatccaagcatatatttaatttagactaccaattgccattattttgagtaaaatattagcattaaaaataaagtacgacacttaaaattttttaaaaagtctattggatcagagatgagttatatctctacaaatagtgaggatttgctctgtatttgacttcatgaagtttctgatttactttttaatcaaaaagattagacaccttgaagacaatataatgaatgtcatttataaaaccactgtgtgcctactctctaggtttaggtccagggttttttctaaacacagttttttatgtagtaagtcattttgatttttgaggatttgatcaataagcttctacttaaagatctctgaagatgcacattctaagagctggtggctagcccaggagagtctgaactattttagttgcattttgaaaaacaggtaatgaaaagaagagtaaggactggaagccacataaggtggttaaaaggtataaatggacgaaaatccagacctgctccttagcccactaaaactttttttttgttttgtttttgagacaagtcttgctctgtcacccaggctggagttcagtggtgtgatctcaactcactgccacctccacctcctgggttcaagagtttgtcctgcctcagcctcctgagtagctgggattacaggcacatgccaacatgcccagccagtttttgtaagtttagtaaatatggtgtttcaccatgttggccaggctgctcttgaactctcgacttcaagtgatctatgcgcctcggcctcccaaagtgctgggattacaggcatgagccactgagcccggccatagcccgctaaaactttgacaaacatcagtgcaatttaactataagttcccaatcaagagctactcctctgagatctatctgattgaaaataccccaccagaaaaaccttatcctcattttctcaggtcctaaaagttaattaaagccactctctgaacttgaagcaaaatttacacaggcagtttgaggtttctgaatctttggggccaaatgtgctcagaggaaaaggaagaggtcttgtctttgaaatattaaaaaccattccagggctggggccttagcacttcgctgtagagctcaagcctaatttcagggtaccaagagaggggcttctgaacataaagcccaggaggcaatcgagaagggttcttaccctgggatccacatggaggtctgggaacctcctgtggttgtctctaaaggttggtgtttatgtcgatgtttttgctttcatctgggaaagacaagttgtaactttcatcaaaatctcaaagaactctctgatccaataagttcatacctttgaaatagaggaggatgccaaggagagtagaaggaagagaggaataactgctcatttaagttaaccaattcagaagtatgacatgcaaaaagacaggacaaaagtaattcatatccttaggtcattgtggttcaaacttaagacaggctcaaactccttcctcttctctttatcatactcttattcctgttttccccaacacagaaacccacattataagtacttgaaaagtgtgctatagtaaagcaaagcagtaggatgaatcaggtgtatgcggtacttttttctggagtcccacagaaaggtgctcaaaaacagagacctgcctggttcctccatagccacagactgcaggatttcggaccctgggactatgtgggatactcttggaaagtctgaggaaaattggaagtagcttaaccatgtgcattttatctaggtgcatataacattgctgagttcaaaatgcctagctatccttggatcttccctgaattagaagtagcctaaccacgtgcatcttatccatgagcatataacattgctgagttcaaaatgcctagctatccttggatcttccctgaatcctaaaccccactattcctaagaattttctttttattgtaacaataatggctaacatttactaatcacttactatgtgtcaggctcagatctggatgcttttcagcaaaatcttatttaatcctcatgatgaaactatagagtattattactatatccattttatagaagaagaaactgagtcattaacaagattgagtcttagggcagaaaaggaaactatgtggatattccagatcagtcccagaagattcataggctcacagaaagaaatgggagggatggggatgagaaactattcaattgtaagcttgtcccagggcacctacccagtcttccatttattccatcatttatcccagagagaagtacagtcttggaaaatggggtgacaggtttaccatgatctattctcagagagcccctataaattctagtaggaggaacagcagctgcggagccagaggacaggccccagatcccaacatcatgtagcctaacagtgaagcttagataaaacacagcctctgtaaaccacgatggctttatttgtaaaatagaaatagcaacctcaactcacaagggtgttgggagggtcaaagtggacagcaagtttaaaagtactcacaaaatctaataggcaattcaacataaaactccatggctatcgctgttcctcactttctgaacctttacctgcctgactttactccataccactccaactcacttcaaccacttcccatgcagaaaaaaataaactcaccatctcctctgtgactctgctggttttctgccttctgcccaacccagactgcttacagtctcactgcctcccctcagtgtcaggctgtttagaaaaacaacttcctattcacattccagaaactcaccacagcccttcccatgaagttagaatgttgataatgcaagagtaatgttggcagcttagaaatagtggttgccaagaggcaaggggtcacccccttccatggaagatggtctggaggcaggcgcaaggtgaattactcctggatatcccaggctgagcaatgtgggaacagtacacacacaaaggtttccttggattatgatataagctccaatttaaagtagtacatttggaaaacatgctttgaattaattacaatgtgattttccagtgcccattttccagtaattatgacatgtcagtgaatgtttactattccggcagccttctgagggaaagaagcaaaattagtagcacaaaaaaaaatagagagaaatggaaaaagccactaacagttttctggcgcttgggaaattttattggtaagtttcaaaatgacgtattaaatagacataggtcatgtgaaaggaattctgcttcttatatcagaaataaaaaggtatacaaatagatacctttttattttcctcttcccatgggatgtgtaggaccaaaaagctgttggcatagtggttaagacttcagctgtgctgttaaactgcccgagacccatcctggctcctcttctggctatctactgggcaaactacttaagctctctatgcctctgtttcctcaactgtaaaacagaataacagaacttgcctcaccgggttgttgtaggatgaaatgagttaatatgtacagagtgattgaaatgacacttggcccacaattgatgctcaacaaatgttagtgattattattacttttcagattgatctcagacagcaaaatcaagtatcaagtatttagtttcaagtcagaaagccataactcctatttatactcttggaattctattgtacagtagtaggtattattcttcattcacttcatgatggttacagcttgtaaataggcatctcatggataaatttaaaatggaatgaagtagaaacattggaagaaagtctaaaggtaaagatgaattagggtatataaggctgcatttgcacgttggaatttgggaccaagaagaaaaaattaattatatagtagaagtagaaaagatggtgaaggaaatgctgttgaaggaatgactgtaggggaataagggaaacttagagagaggaaaaaatgaggaacttcttggcagcatgatgcagttcagagtccagaccctagagtcagactgcctggctccaccacctaccagctgtgttgggcgttactaatctccctataactcagtttcctcagtgatgtggtttggctgtgtccccacccaaatctcatctggaattgtagctcccataattcccacaggttgtgggaggcacctggtagatcattgaatcatgggggtggtttcccccatactgttctcatggtagtgaataagtcgcatgagagctgatggttttataaggggaaaccccttttgtttggttctcatttctctctcttccctgctgccatgtaagacgtgtcttttgctttctaccatgattgtgaggactccccatccacgtggaactgtgagtccattaaacctttttttttttaataagttatccagtctcgggtatgtctctatcagcatcatgagaacagaataatacactcagcaatgtgaataataaggataataatcaccaaatacatagacatgtaaggaccattaaatgaatttaatgtgtttggaacaatacctatcacgctgttaagtgtaagtttaagtgttggctattattctataagacttgcctccatgtctttctgttcttactttcactcaccagcccctctttttggcattgcctcatgttagaaaaaatatatatagtctcagatggggatgaggaagtgtggtatgtagactagtaggttctttttttgagacagggtctcactctgcggcccaggctggagtgcagtggcatgattactgcttgctccagccttgacctcctgggctcaagcaattctcccacctcagcctcctgagtagctgggactatagatgtgtgccatcactactggctaattaaaaaaaaaaatctctagagatagggtctctctatatttcccaggctggtcttgaattcctgggctcaagtgatcctttcacctcagcctcccaaaatgttgggattacaggcatgagccaccatgcccagcctggtagtttcttatttataataagtttgatattaataagttcaattgatcatatgtttttaagtttgatattgttaaattttagtgaatataaggaaagcataaaaagattcctatgcaggtgacattagcaagatggtggagtaggagatgtcagccttatgccccaacaaaaaaacaaacatagacagttatacacaaaccaaaatagccctcacaagggtggggagttgggggatggggctcaagagcctgttaaagaatttggaacaacacaatggagaaaagaaagaatatccatgtagaagaatcaccggtgagactggcatatatgagacaccaggagatagctacgaataaagaaatttgtaggctatctgtgtcagtcatgtgacacagagccactgaggcccccagtgtcctgctccacagaggacactggcatcttttatccaacagccattcccatagcaggatgctaaaaagggaaacacagttgcactacccctcacaccccctcaccaagaagcagctattgttgcactgccccaggactggggccagggttaccacctctcacaagtctatgtgtgttcctgatccccaaaagttgtggctgctctacagatattcacactctggactgtggctctgtggctgcagtgcacctcctcatgtctcagacactggagtcactgctgttgtgaactagatctcaccctgggaccccaagccaagttctctctgtgaaagtctttgctccagacactagttcagccactgtagaaaggtaacccatattctcaactccagagctgctgtagtaatgtgcacacctgcgctccagaccctgtctctgaggctgtactacacacacccacacctccaacaccagagccaccactatagtgagctagtgaacaccctgggtcctagagtcaaggtttctctgtgcctgtccatgctctagtcaccagctcagccaccaaggagagctagcccacaccctggatcctggagccactgtagctctgcgtatgcatgcagtaaagtccctggctccttagctgctttataagtacctgcattttacacaccattatcaatgtgatagtaagtatgcctgtgccttgggcactggtaccattgctacaattgaatctggtgctgtggtccctccatgcatgcccatgcttcaggccttggctcttggccactccatgggcactgttcatcagacaccagtgtcaccaccaccaggagcaggcctgcaagttagacctaattccaagagggatgtcctcagtcatgacttcccaggtggggaaaaaaagagatatggaggacttgtcacaattgaaaacctcaacagcctcattgccactgtagatacccacagtgttggcctctaaggatccctgtagtattcactaacaccaacctcagctgacagatctgcatggagaccacacagctttgcccctactgaagtcagaacttttgcatcccacccagccagcatcctcgcattattccacataagaaggtatttctccaccaaagtcagcccatacagcctgaaattggggcagatccaccagatgctcagacagcagtgtaaggcagcaagaaacatgaaaacccaaattaaaatatcaccacctaagaaacacaataatttcccagtagctgacccaaaagaaatggagtactacaaatggcctgacaatggattcaagataattgtttttaaagaagctcagttactttgaagcaaacacagagaaacaatttggtgaaatcagagaaacaataaatgcacaacataagaaatgtaacagaaagattgaaatcataaaagaaattggagctgaaaaatataatgaatgaagtgagaaatgcagtagaaatcaccagtagcagacttgatcaagcagaagaaagaatctgtgaactgaagacaggtttttgaaaatatacagtgagaggagaaaaaagaatgaaaagaaatgatgaaagcctacaagatttatgggacagcatcaagagagctaacattcagccagactcagtggctcatgccataatcccagcgctttgggaggccaaggtgagtggatcacctgaggtcaggagtcaagaccagcctgaccaacatggtgaaacccagtctctactaaaaatacaaaaaaattagccagggattgtggcacatgcctgtaatcccagctactggggagactgaggcagcagaatctcttcaacctagaaggcaaaggttgcagtgagctgagatcatgccactgcactccagcctgggtgacagagtgagactgcatctcaaaaaataaaaacaaaaattaaattaaaaattaaaaaagagagctaatgttcacattacagtagtttaagaaggagaaaatagaggaaaagggggtcagaaagcatatttaaagattgctagctgaaaatttcccaaatctgaaataaaatattaatattcaggtacaggaagcttaaaaatctccagtcaggttcaatccaaaaaagactacaccaagacataataatcaaactatcaaaaatcaaagacaaagacaggatcctaaaatcagcaagagaaaagaagcatatcacagacaagaattgcaataaggctatcacaagatttctcagcagaatgcttctaggcccagagagagtgagatgatatattcaaagtgttgaaagagaaaaaactgccaaccaagagtcccatccttcagaaataaagaagagataaagactttcccaaacaaataaaagctgaggtagttcatcaacacgagacctgccttacaagaaatgttaaagggaattcttcaagctgaaagaaagggatgttaattaattacatgaaaatctacgaaagtataaaagtcacaggtaaaaataaaaatacagtcaaattcagaattttccaatattataattgtgctgtataaatcacttatatctttagaatgaaggttaaaagacaaaactattaaaaataattataaccacaataagttaacagatacacaatataaaagatgtaaattataacatcaaaagcataaagtctgaaaaatattaaaaacctataaaatgtggagggagagtaaaagtgtggagtttttttatccttgaagttaaattttatcagcttaaaatagcctgttataactattatatgttttatctaagtctcacagtaactacaaagcaacaacatcacattaaaaggattattcaccatgatcatgtgtaatttacccctgggatgcaaggatggttcaacataagaaaatctataaatgtgatacacacattagcagaatgaaggacaaaagccatataatcatctcaatatatgcagaaaaagcatttgacaaattttaccataattttatgataacaattggtaaagaaggaatagtgccctcaggcaataggaaggaataataccctcaggtgtggaaagaaagtaacttcaacaaaataaaggccatatacataagcccacagctaacattatagtcaatagtgaaaggttgaaagcttttcctgtaagatcaggagcaaggcaaggatattcacttttgccacttctatgcagcacagtactggaaatccaagccagagtaattgggcaagagaaagaaataaaagacatccaaatcacaagaacttgtctatgatttcagacaacatgatcttatatatagaaaaccctaaaacatgatcttatatgtagaaaaccctaaagacttcataaaaaaaaacttttagaactaataaatgaatttagtatagttacaggatacaaaatcaacatgcaaaaatcagcagtgtttctcatacactaacaacaaactatctgaaaaagaaattaagaaaataatctcattataccagctacaaaaaaacacacttaggaataaatttaaccaaaaagataaaagatctatatactgaaaaccatgaaacaaattgaagaagacaaaggaattgaaagatatcccatatttatgaatttgaaaaattaatattgttaaaatgtctatactacccaaagcagtctgcagattcaatgtaattcctatcaaaatttcaatggcatttttcagagaaataaaaaataacaatcttgaaattcatatagaaccacaaaaaaatcctgaatagccaaagcaatcttaagcaaaaagaacaaagctagaagcagcacactgcctgatttcaaaatatactacaaagctatagtaattcaaacagcatactggcataaaaatagatacttagaccaatgaaacatagtagaaagataaggaatagattcatgcatttacagtcaattgatttttgataaagatgccaagaacattcaatggtgaaaggagggtctctttaataaatgatattgggaaaactggatatctatataaagaagcttgaaattggattcttgtctcacatacataaatcaaaggaaaatggattaaagacttaaatataagtcctgaaactataaaacgattagaagaaaacacacataaaaagctccatgacagcttgcagtgagccgagatcacgccactgcactccagcctgggcgacagagcaagactccgtctcaaaaaaaaaaaaaaaaaaaaagctccatgacattaatcttggcaacgactttgtatatgaccacaaaagcacaggcaacaaaagcaaaaataaacaaatgggataacttcaaactaaaaagctttttccaaagcaaaggaaacaattgacagagtgaagagacaacctatggagctgaagaaaatatttacaaaccatgtatctgatagaagattaatatgcaaaatatgtaagaaactcaattgcaaaatgcacacacacactcgcgtacacacacacacacacacatataactcaatttaaaaatgggcaaagaacctgaatagacatttctccaaataagacatataaatggccaacaggtatatttaaaatatttgactaatcatcagggaaatgcaaattacaaccacaatgagatattacctcatacctgttagaatgactactataaaaaagatgaaaggctgggtgcagcggcttatgcctgtaatcccagcactttgggaggccgaggctggcggatcacgaggtcaggagattgagaccatcctggctaacgcagtgaaaccacgtctctattaaaaatacaaaaaaattagccacgcgtggcggagggtgcctgtagtcccagctactcaggaggctgaggcaggagaatggcgtgaacctgggaggcagagcttgcagcttgcagtgagtcaaaattgcaccactgtactccagactgggtgacagagcgagactctgtctcaaaaaaaaaaataaaaagatgaaagataacaagtgttggtaaggatgcaaagaaaagggaccactgcacactgttgctgggaatgcgaattggtagagccattatggaaaatggtatggagtttcctccatatgacacaatcccaccactgggtatgtagccaaaaaaaaaaaatgaaatcagtatgtcaaagaaatgctaaactcccatgttttttgcagcattattcacaatagccaaaatatgaaatgaacctaggtgtctgtcaatggacaaacggctttcaaaaaaaagtggtatatacacacaatgaaatactactgagtctttaaaaagaagggaatccttggctcagcactgtggctcacgcctgtaatgccagcactttgggaggccgaggcgggcggatcatctgaggtcaggagtttgagaccagcctgaccaacatggagaaaccccgtctctactaaaaatacaaaattttccaggcgtggtggcacatgcctgtaatcccagctactcaggaaggctgaggcgggagaatcacttgaactcgggaggtgcaggttgcggtgagccaagatcgcgccattgcactctagcctgtgcaacaagagtgaaactccgtctcaaaaaaaaaaaaaaacccaaaaaagaagaaggaaatcctgtcatttgcaacaacatggatgaacctgtaggactttatgttaaataaaataaaccaggcatagaaagaccaatatgtgatctcacttatatttggaatctaaaaacactgaactcatagaagcagaaagtagaaaggtagttactaaggactggaggtgaggtgtgggaattcggaagatgttggtcaaaggatacagagtctcagttaggaagagtaagttcaagagatctattgtaccacatggtcactacagtttataacaatgtattatatacagatgattcctgacataaaatgtttcaacttaggatttttgactatatcatggtgcaagagccatatttattcagtatagatttatgatggggttatgcttggataaacccattgtaaattggaaatatcgtaagttgaaaatgcactttcaactttcaacattttcagcttatgatgatgggtttatcaggatgtaacatcattgtaacttgaggggcatctgtacttgaaaattgcaaaaagagtagcttgtaaatgttctcatcacacaaaaaataataatgtgaggtcactgatatgttaattagcttaatttagccatttcacaaaagtatagatatatcaaaacattgtgttgtacaccataaatatatataatttttatttatcaattacagttaaattcatacatacatacatatacacatacccaccaaaaataaagaaaaaagaaaatgaaaaagaagaatctctaggaataggaatgagaagaaaaaactgaatttgtttaaaagctactcaggctcaataccattttctcatatggatataatctgtgtagaaaatttgggttgtcactaaaaatgggatataattccaatataatttaattagtagtgttatatatctggtttgtattttttttatgtcttcagattataccatacattcccagagggcagggatcctttcctatattaatcttccatcacctgaagtatctagcagagggcagagagacactcagcaaatacttgttgattcattggttgattcattagaccccaaggggacacaatgaaagtgctccctcccatgttcctctctgaattctatttatctcattacactggtgcattcaaatacacaagaaatagctaagtccctttgagactcctgagagtgtgctagcatagggattcagtcatgagtatatctcatgaagcccatggttttgttgggggtgggggagcagatattaaataaaaatcacacaaataaattcaggaagaaaagaatgtggtacaatgaaagggcatgataggaattggaaaactcctttaagagaacagacacttctcaaaagaagacatttatgcagccaacagacacatgaaaaaaaatgctcgttatcactggccatcagagaaatgcaaatcaaaaccacaacgagataccatctcacaccagttagaatggcaatcattaaaaagtcaggaaacaacaggtgctggagaggatgtggagaaataggaacacttttacactgttggtgggactgtaaactagttcaaccatggtggaagacagtgtggcgattcctcagggatctagaactagaaataccatttgacccagccatcccattactaggtatatacccaaaggattataaatcatgctgctataaagacacatgcacacgtatgtttattgcagcactactcacaatagcaaagacttggaaccaacccaaatgtccaacaatgatagactggattaagaaaatgtggcacatatacaccatggaatactatgcagccgtaaaaaatgatgagttcatgtcttttgcagggacatggatgaagctggaaactatcattctcagcaaactatcgcaaggacaaaaaaccaaacaccgcatgttctcactcatagatgggaattgaacaatgagaacacttggacacaggaaggggaacatcacactccagggcctgttgtggggtgggggaggggggagggatagcatgaggacatatacctaatgtaaatgacgagttaatgggtgcagcacaccaacatggcacatgtatacatatgtaacaaacctgcacgttgtgcacatgtaccctagaacttaaagtataataaaatatatatatataaagagaatgactttggagctgaggtctaggttgggagaactttctaggccagtcaaggtttggagcaagcagcctgggagcctagagacagccatggtggccttggggcaggaacagaggctagagatgtagggagggccttggctatgccaggtctatgttaaaattgagttttcacatgtgccatctgtcattagatcaaatcagagacagttatttcttcaggaaaatttcacctgcaaagctgtttcctccactcagaagactagggaactttgtaaataataggttataggaagacaagttacaatttaaaaaaaagaatttacagctttttttctttactgttaatatatgttcattgtgaaaaaatacattgaaagttcagaaaagcacaaagaaggggaaaaattgctcataatactgtcaccaatgaatctgaatcacattgtacattgttttaaaatatgctttttaatattcagtgatatatcataaacctttttgatgttttaaaatatatttctgttctagttacaactaaaaaactcccaaatatataagtagatataagtataactatacacatggagatatagatatacatatagatagagatacaacataatgatgaggaatgaagataaattcaacctccccacagcttaatgtccttaacaaaacttcccagggagatggaacacttctggtccatttgcctgaagtgtctgtccctttcctaatgttctctccccttgtcatggaaaaagatgccaattttccccatacagctttagaaaggtatcttatacaagtttcatgaactcgtgactctgcttgctgaaatgccatttgaattggcctgtggtattatgctcaaacatttcttttctttatctttgctctccagtttttgaaagggaaggaaaggcaaggaaataagtcaacttaacaaaagtcccaaacagtaaacatgaactttgaaaaaactgtcttcctatatatccttaaatagaaataggatcctcaggaaacactatacatttccatatttatacccacttagccccacttcatggttcattttttcattttatatatttttgtgagggcctgctctgtgctattatctaagctacgctctgatcacacaaagatgaataagacagagtccctgtcctgaaggagctcgaacacctgtggagaagtgagcatataaacagataattatagacaatgtcaaggagtcaataaacacagtcccacaaaagggactcccacaagagacccacaagaggccatctgacagtctgatagtgggggtggagagatggtcagaaagggtgtggaggagaaacccttgagctgagtgaaataagttggattctttggtgcaaactcaatggttaaacttgcacacaaggaaaatgctctaaaatcaacagacaaattaggaagtggtttttctccttaaaaaaagttctatccttcccaaagcatactgtgtctgcacgctccgatcaccaaaaggctgtgataaccacagaagggttatcacccattctagaatactagaaacatagtcacatgggtgatctatttataaatgaacaccatgatagattatttaaaagtcactgaggaaaggaagcagagatattgttatatttatgagctgacattattcttgggccagaccctggctacacatttaaaaagctatatctcatttaatactcaccacgacatcatgaggtaggttccatctgcacaactggtctgtctacttagacagtattttgatgtccattttatttaaaaggaaattgaagattagagcgttaactgttttcctcaagatggcacagttgttaagtgaaataaatgggattcaaatttaagtgcaccccaaataatactatattaaaatatgggatttttcattaaactcatttaaaagtgctcatttttgttaagagaagaggtccttcagaaccccttcccttagttttctggtgagctctatgctagaaatctctggtaattaaagatgaattaaaagtaagactatatcaagctacttcttgtatctgtgtcaggacacagaaatcacatctcagggcaagatcttctgttattaagtctgcttgagtcaaaatcaccttgtttacacagggaagctttggtcagttttctgggcaatcatttttttgtttttttgtttgtttgtttttgagacaaagtctcactctgtcacccaggctggtgtgcaatggctcaatctcggctcactgcaaccttcgcctcctgggttcaagcaattcttgtgcctcagcctcctgagtagctgggactacaggtggggaaagtatttttgatctggaaatgtggggcaaacatgaacatgcttcaattcgtaagaaaaaaagcctaggttgaatgggacgtagaactggctaatttctgagtccccacccaatcattgaattaaaaattatgcggttaagagtttcctgaaaccttcctggttgacttgtcctactgtttcccatgatcaaaggtaataaaagactaaatagctaataatattcattttctttaatgcattcaggggaatgttacctccaatgatgattataccaggtctctgcaatcattcgttctttagagatacatctctgaaattacaaatagatatcaaatttataaaaacatgcattaaaaattttcattgaaacatttattaaaaattaaaaatgctaattaagcatttagaggcacatcccatggtttatgaaagtgtttctccagtttaattttttgcttaaaaatcaactcataatggataaaagacctaaacataagacccaaaaccatagctcctagaagaaaacacaggaggaaagctcattaaagttggtcttggcaatgattttttggatatgaccccaaaagttgaggctgcaaaagcaaaaatgaataaatggaataatatccaactaaaaagtttctggacagcaaaggaagcaatcaacaaaatggaaaaatagcttacagattgggagaaaatatttgaaaaccatatatctgatacggagttaatattcaaaatacaactcaatagcagagaaggaaataacctaatttaaaaatgggcaaaggactgaatagagatttctccaaagaagacataaaaatggggccaagggcaatggctcatacctataatcccaacactttgggaggccgaggtgggcggatcacttgaggccaggagttggagaataacctggccaatatggcaaaaccttgtctttactgaaaatacaaaaattagccaggtgtggtggtgcactcctatagttccagctactggggaagccgagacatgaaaatcactttaactgggaggcagagtttgcagtgagccaagatcatgccactgcactccagcctagatgacagagcaagatctgtctcaaaaaaaaaaaaaaaaaaaaaaaaagccaacaggccaacaggtatatgaaaaggtattcaacatcactaatcatcaggggaatgcaaagcaaaatcactataagatatcacagacagctattatcaaaaagacaagagccaacaagtgttagcaagtgtgtggaacaaaagccaatccttgtagagaaacttttgtttaaggattaagcaattaacgaaataagacctctcaaaccagcatccatcaatgttaacagcaacatcaacaatcatttattgtgtcttttccataggccattgttctagggcttgggacctcacaaaaataggagactcagtttgctgagtctgcattaaaaactgcctctgggagattttaatctagttggagatacaggccaaacacgaagaaaggagatataactctatgagacaatgcatgcccacacaggtgagagccaccagagttcagagaaagagtgaaataaccaagcacagagaataaaggacacaaagtgcatctcgtgctttcttcttcagtcccacaagtctaggtgaggtcagcctcccactgcctcccgtaaagctgtggattttcctagacagccaattgtactatttcttcttccctccctctcctcctttcttccttccttccttccttccttccttccttccttcctttcttcctcccttccttttttattttttggcagggtctcactctgttacccaggctggggtacagtactgcaataatagcttactgcagccttgacctccaaggctctagtgatcctcccacctcagcctctcgagtagctgggactataggcatgtgcccccacacctggctaatttttgtattttttttataatgacgaggtctcattatgttgcccaggctggtcttgaagtcctgggctcaagcgatccacacaccttggcctcccaaagtgttgggattacaggcgtgagccactgcacccagcctcaattctattatttctcaaaatgctaatatttgttaggttttaggaattgaacaatttcatattaggcataaaggaattgcaggggaggaatgcattctaccctttctcccaccacacgcatacactacacatccactttaaaatatatatctgaaagagaatatataagaaagaaagtataatgagtttcttatgaagtttgtgaatatggattttttctcttttcttcaatatttgcccctatcataggttcctaggaattacattttctgtggtgcccaaagtagagacaggtacataggtataagcccgtgcaggcagctgcatgctcagtaaaggcaccaaggctggtggccttttgtctgagtgacaagtaccccgtgtgcccacaattgccttttctacattgggcctgaacagcagtctccctctatggttggcaggtttatcaactgcagtgactatgtgttatttttatttctctggctcataataatagtcaattcaagttatatcagagtcgtgtctgaaatattctctcttccaataagccttctatagaatgtatcagtgcagtgatgttttctgcctataacaaccactattgactgggtgcggtggctcacgcctgtaatcccagcactttaggaggccgaggtggatcatccaaggtcaggagttcgagatcagcctgaccaacatggtgaaaccctgtctctactaaaaatacaaaaattagccgggcatggtggtgagtgactgtagtcccagctgcttgggaagctgaggcaggagaatcgcttgaacctgggaggtggaggtttcagtgagccaagatcatgccattgcactccatcttgggcaactagagtaaaactccatgtcaaaaaaaaaaccaaaaaaccactgcttctccattgtcttagtgggactggcatcctctccacaaaccctattagcctagagctcattaaatgtcttcacattcgagagccataaacccacgttttgttcccatcacatgcaaggcatggatgttatccattaataatttttcatttaataacaaaaaaataatagaacttaagaaatagtagatttctttccgttaaatttggagatgtatttttggaaatggcttcctgagcagtatctctgctctgaatttggggctaagatgagtttcgctgtacagttgaaccagtgggttcttacagagagaatacatattctccaggtatgaatagaatacatgcaactttaattgcatctaccactggccacagtgcccctgaatgagtcctgtaagtgaaaaggtaattttgaacaatgtttcaaaattgacacatctgcttaaaaattatttccttttcttacaaataccttggttatcaaaacgagtaatttactgaaatatatataaactccaactgtgacgttaaacaatggattataataaaataaagaaacggaaaaataacagctatataaagacacttggctggaagtaatcaaatcaagtccgtttttttatccttaaataattctgtgatcctggctcccgataagaggaaattgtctttccaaaaggcataatagcctcctagggatttgctttcctttgaacaatgaagaaggaggaaaaggtgtcattggggatttaaatttaggagacttgtttgtacttaaacttggcttaataagtgttctttagagcttgtttttctttttgttattaaaataaaacttttaaattttgtaactcatctgtcaatgtaattcataaaaatgaattttcacaaaaacagtctttttctaaaataaaaatagaaaaattatgtttctcttataaaagactcataccagaaagacataaagaagaaaacaatcatccaaaacaaccactattaacatgttggtatgcttttagaattttaaattcatatattcacagataattttcaacaaaaataggtttaagctttacttttgtattttagtattttaagttaagtcatatattaaggacatattttcatgttaataaatatgtctctatcattctttgtggtggctgcataatatttcattgtaaaatgcaccatcatgtattcaaaatatcccatatggatgaaaatctttctatttataaattcttgctatcatacacaaaactgcaaaacattctagaatatgtgtctttgcctatatttgtcccataatttctcttggaaaattattagaagtgaatttactagaccaaagtatgtgtgcacttgaaatattgacagatattatttaattatccttcaaataaaagtataaatttgaactcttgccaacagtatatgatggtgaccattcccctactcctgttccaacattttccagtttaagaaacctggccaagctggtagagaacaacaacaacaaatctcatttttctaactttaattactatggagcttacccaatatataatgtttggggagtaacacaaaaaacttaggacattgcataaagatgtccttggatgtcacctcttgccacttcacagcttgaagactttggtgcagtccctagcagtgagtcatgaaaggtggcaggctcaataaaggtgaaaaataaataaaggacttctgctttccagtctagcatgtaagaatattaaagattgtcactccatgtaacaataagtaaaaagctgaacaaactgaaaaatcagaagcttttcttagatccataagagaggcaaggtcacagggaaaactgctgccaccacccccaccccctaccgccaaattaaaaagactaacaggagaatagagaaaatcacaacttactgaagtaataatctctatgggaaacagtgcaggatacattatgcctggctatcagtaaaaaattataagacataccaaaaagccaaaagcacatttgtaagagaaagagcaagcatcaaaaccagactcagatatggcagggatgttggaattatcagatcaagatttaaaacaactacgatttatatgctaagggctctcatggataaagtagggagcatgcatgaatatatggatgatgtaagcagagagatggaagaaagaaccaaaaagaaatgatagagataaaaatcaacataacagaaaggaagaatgccttcaatgggcttactagtagactggagacgactcagggaagaatctctgacgttgagactatcttaacagaaaccttcaaatctgaaaagcagagtacaaagactgaaaaaacccagaacagctacaaaggatataatatgtgagtaatggaaataccataaagagaagaaaaagacaaaggactagaaggttatctgaaacaataacaactaataatttcccccaaattaatgccagacaccaagccacagatacagaaatctcagagaacatcaaaaaggataaatccccccgcaaaatacccgtaggtttatcactgtcagactacaggaaatcaaagataaagaaaaaaatcccaaaagaagccagaggggaaaaataccttacttagtatcttagtccattttgtattgctataaaagaatacctgaggatgggtaatttataaagaaaggagagttatttggctcactgttctgtagactgtataagaagcatgatgccagcatctgcccctcttctggtgaggcttttgtgctgtgtcaaaaaacatggtggagaaggtcaaaggggaagtgggcacatgtgaagaggaaccagtcctgaggggcatcctggctttacagcaactcactctcagaggaaactaatccattcctgtgagaactaaacgagtctcaccagagtgaagcccactcactaccacaagaatggcaccaaaccatttgtaccagatccaccctcatgactgaaacacctcccactgggcctcacctcccaccaccaccacaatggggatcaaattttaacacaggatttgatggggacaaacaaaccatatccaaaccatagcacttatagaggaaaaaaataagaattgcatcctacttatcttaagaacctttcaagcaagaagagaatacagtgaaatatttagaattgaagtaaaaaaaacaacaacaaccaggctaggattctgtaccctgtgaaataatccttcaaaagtgagggagaaatactttctcaaacaaagttgaaagaatttcttgtcagtaggcctgccttgcaaaaaatatatttaaaagttctttagagagaaggaaaatgaggaaaaccacaaaactcagatgagagatatcaaagaactaaataaactgaaagatatttcatgtttacgagtaggaagactcaatgttattaagatatcaattcctcccaacttgatctttagatttaatgcaacctcaatcaaaatcccaacaagttatttcgtcaatatcaacaaactgattctaaagtttatttgctactaaggcctaaatgtttgtatgtcccccaaattcatatttcgaaacccccagggtaatgtggggccattgagaggtgattgtaccataagggaattagtgcccttataaaacagaccccacagagctcaccccttccaccgtgtgacgacacaactagaagtcaccacctatgaaccagagcacagacactaagtctacttatgccttgatgttggatttctcagcctcaagaaccatgagaaataaatttataagccgctcagtgtaaggtattttgctattgcagcccaagtgtattaacacaatattgccaacacaatattgaaggagaagaacaacgttgaagtaccaatactacccaacttcaaaagttactataaagctacagtaatcaaggaagtgcagtattggtgaaaaagtgcacaaatagatcaatggaatagattagagagcccagaaatagaccaacataaagtcaactgatctttgataaaggaacaaaggcaatacaatggggcaaagatagtcttttgcacaaatggagctggaacatctgaacatctacacgcataaaagatctggacatagactttacacacttcacaaattttaactcaaaatggaaaatttaatgcaaaactataaaactcctagaagataacaggaaaaaacctagataaccttagatatagtgatgactttgtagctacaacaccaaaggcacaatacatgaaacaaatcattgattaagacggacttcattaactttaaaaacttctgctctgtgaaagacaatgtcaaagaaatgaaaagacaagccgcaggctgggagaaaaatttgcagaagatgcacgtgagaaagcactgttatccaaaatataaaaagatatttaaaacttaacattgagaaacaaaccactcagttaaaaagtgggtcaaagatcttacaagacacctcaccaaagaatgtgtgcagcttacaaatgatcacatgaaaagatgctctgcatcatgtgttatcagtgaaatacaaattaaaagaacaataaaataccactatacagctgtcagaatggccaaaatctagaacactgacaacaccaaatgctaacatcctttgtgtgacaacacaaaggatgtagaacaataggaactttcattcactgctagcgggaatgaaaaatattacagccactttggaagaccgtttggcagtttcttacaaaactaaacatagtcttatcattcgttccagaaatcacacttcttggtttttacccaaaggagttgaaaacttatgtccacacaaaaacgtgtgtatgcatgtttatagtagctttattcataattgccaaaactgggacgcaaccaagatttccttaagtgggtgaatggataaactggtacatcctgacaatggaatgttattcagtgctaaaaagaaatgagcaatcaagctttgaaaagatgtggtggaaacttaaattcaaattacttgaagttaaagaagccagtctgaagagactgcatactagacaattccaactatatggcattctgggaaaggcaaaactatggagacagtaaatatactaatggttgccaagttatggtaagtggaggaatgaacaggcgtagcacagaggatttcttgggcagtatgataacataatggtggacacacatcattgtacatttgtccaaacccataaaatacacaacaccgagagtgaaccctaatgtcaactatggactttgagtgataatgatgtgtcaattatgttcatcaattgtaacaaatgtaccactctggtagcagatgttgataatgggggaggctatggatgagtgggggcaggggatacacagaaaacttctgtaccttctgctcaattttgttgtgaacccaaaactgctctaaaaataaagcctattaaaaataattaaatgaaaatataggtgtctaagacacaaacactgactgttccctgggtttcacggctgctgcttttgtacttgctcaccttctatctgcaggactggtcagttggcttgtttagcaaattagggtcttttcataaccctgtgtgccagagactgcattgctagaagcacactaaattcaaagagaggaattctggtctgataaacgtgaatttgaatataattcttaaaaaacttaatatgtattttggagtaatactttgacaaccgaatatcttggttaccaaaatgagtcactgattgaaatatatgcatactccaactgtgatattaaacaatagattataatataataaacaaatggaaaatagcaactgtctaaagtcagttagctggaaaaatcaaatcaagtccaattttttaatcctcaaataattatatgatcctggtttctaataacagagaattgtcttacccagaggtttaatagcttccccgaggatttacttaagagataatggggatcctgcaatgaccctaaatgaaactttgggatcccagagggcagtaatgcatgacagtttagttttaagtgatgttatccaaggggcagagtggttcgttctttctaaatgaagtggtctgctggcaatacctaaacaccttttatgattagtccatttcatccaggctatattactcagaacttcaaggtttcagtttttttgtttgtttgtgtgtgtgtgtgtgtgtgtgtgtgtgtgtgtggttttttttgttttgttttttgtttgtttgtttgagacatggtcttgctctctcacccaggctagagtgcaatggcacaatctcacttgactgcaaactccgcatcccgggctcaaacaatcctcctgcctcagcctcccaattagctgggactacaggcatgcgcaaccatgcctggctaatttttgtattttttgtagagatggggttttgccatattgcccaggctggtctcaaactcctggactcaagctatccccctgcctcggcctcccaaattgctgggattacaggcataagctgccgtgtctggcctcagtcatctgctttttacaaatacttgggctgtgtggccttgggcaagtagctcaacttctctgagtttaattttccctatgtgacctatgtaaacaataaagagattgcatagtgtaccgtaaacaatttggatttaccccaggaatgcaaaatgtatttaacattatcagtgatataattatctacattttaacagattgaagataattcaaaatgtaatcttttcaacatacaaagaagttcaataaactaacatttatttatttaaaaaattataatgacagggaactgctataatatgtaaatggtatctacaaagaaaacccgtaacgggcattatacttaatggggaaacactataactgttccctgtaagatgaataacaagacaggatctcactatttctgtctctatgcaatattgtactagatgtcctagataaggcaataaggaaaaaaaaagaaaaaagaaaagatataaggattggggggtaagaaataaaattgtctttatttgcaaattatatcattgggtagaaaacttcaatgaatctacagaaaaattactagaatagtaagaaaaattaaaaacttggctccttaaaaaataatatgtacatttgagttgcagttctaagtatcaacgcaaaaattttaaaatgtgcttttttataaaaagacttttacagtacagtaaaaatttcagatacctaggaataaatctaacaaaagatgtataatatctttagagcaaaaatacaaaattttattgaaaacatagaaaacctaaatacaaagatatgttcatgaatcctaaagtgtgtactcataaaaatgtaaatattcctaaaattgacctatgcatgtaatgcaattccaattaaaacccaagcagttttattgtagagctccttattaacttaataaatgcttattgaacacttagtccttgctagacactgtactaggtatagtaagaatatagcaatgagcaagacatgaactctccattctcatgaaccttggactagtgagagaaactgacttaaaatacgtaattattagtttgacatgttgattatatgctgtgtgattggcatattacagatgataaaattgaaactaaacatgtcatttgccaaacccaagatcacagaactagtaatattagagccagtttttaaagccaagagtgacaagtctgatttcaaagcctacattctttccacatcatcatgcagatttccaagaccctctttgtccaaaagctcagccagcatgcattcctctgtgtacctctatagggccacaactatgtctcaaaccctcacaaaatatatatgacgcgggtataaagctgcaaaagtcaagtgctacagtcacagtgaaatgcatgatgggtgttcacagatgccagcaccactgggctctgtgtttaggccaagttggcagcaactgtggtgtgatttcagggatgcttctgctctaaaagatctcagtttgtcacagtttgtgaaaaattccacacttggttcagactgtaggatttcaggaatattgtggaataagtagcaatgtcagcaacctgcttgtctccaatgttattactgtaaatatttttcagtaactacaacaataataatataaagcctctaccctgcctcacaaccaagtaagactttgtcacagtctggctttctcctctaacgtgcctaacctcagtggccagatgtgtgtggtgggaaaatctatgcacaaccatacctcagaaatgggatccaagacctgtacccccagtcctagttaatgaaaccctggcagcccacctggcatgggtcagggctgtcaccccatatggcctgctacttcagccttgtcctaggaagcttcaaataccaacatttaagacaagtagttaaaaccatctttttagatttgtgaatagcaaggaggatcaacaagtcaaaatcatggagactaaatagtgcagaaaacaaatgctttataatgaaaagaaacaaaaagtcaagagctgagaaactcctttcctctgaggttcactttatgaatcagaagaatattctacacaactggctatttcctatgcccagtgagattaaagacgatatggcaacagaatgggaacaagtaggagaaaacacaggttcaatgaaataaatgatagagcaagaaaatagtggctatatgcagtaaaaagcagaattactactgcagaaaaataaatacacagtacaaaacagagtccctatattataatggttgagaacctgactcctgcatcagacagatttggctagaattgaattacaattctgcattgcttctcagccttttggctaagatcaagtgaattacaattctgccacttatcagctgtatgatcttcagcaaatgcatcatccataaagtgaggagaagaagatgaaacaagaatgcatttatagtgttaaaatagtgcctaaaacatagtcaatgctgtataaagttatgcctattattatttttattctaaccaataaacttaataattattctttggattgaggcactcaggatcctctgctccaatgtcaacatccctgagagtggtagacattccatattatcaatattgttgagcatctgctttgtacgaggaaaatttatcaaacaaccacctaacataggacaccaagaaactaagaaaatggaaaatatgaccagtattttgaagagtgaggtgagctgagtttcccaaatgtgaccatgaaaacatgagatccagagagaccgtgccagatgtggtgcatgcctataatcccagcacttggcaggctgaggcaagagcattgcttgagctcaggagtttgaaaccagccggggcaacatagtgagaccctgtctcagaaaaaaaaaaaaacaaaagagagagagagacccagaggaaagctccagatttttgactcctcccacttccatgcacatgactcacttcacaattcccaagaatggtgatgatactaacagaccctagtctttggtatgaaataatgaattgctttcattacctatagaagattaatattctcactaggattctatatatcttaagaggctgtccaactcttattcctctccttcgaagatacttaatctacaagtgtctgtaatataaagacacagttaaatacaaagcgtcatggcaagtgtctaggaaagtcactttatttatgccatctctaatggtgccagcaggggtaataagtgatggagaagcaatcaaaaccacacagttaaaaccacttttagggccagtggctgacaagatggctgaataggaacagctccagtctgcagctcccagcaagatcaatgcagaaggcgggtgatttctgcatttccaactgaggtacctggctcatctcattgggactcattagatggtgggtgcagctcatggagggtgagccaaatcagggtggggcattgcctcacccaggaagtgcaaggggtcagggaactccctcccctagccaagggaagcagtgagggactgtgctgtgaggaatggtgcacttcagcctagatactatgcttttcccatgatcttcacaacccacagactaggcgattccctcaagttcgtatgccagcagggccctgagtttcaagcacaaaactgggcggctgtttggacagacaccgagctagctacaggagttttttttttcatatcccagtggcgcctgaaacaccagtgagacagaggtgttcactcccctggaaagggggctgaagccagggagccaagtggtctagctcagtggatcccacccccatggagcccagcaaactaagatccactggcttgaaattctcactgccagcacagcagtctgaagttggcctgggatgctcgagcttggtggggggaggggtgtccacaattactgaggcttgagtaggtggttttcccctcacagtgtaaacaaagttgccgggaagttcgaactgggcagagcccaccgcagcacgacaaagctgctgtagccagactgacctctagattcctcctctctgggcagggcatctctgaaagaaaggcagcagcctcagtcgggggcctatagataaaactctcaactccctgggacagagcacctgggagaagggatggctgtgggtgtagcttcagcagacttaaatgttctgcctgccagctctgaagagagcagcggacctcccagcacagtgctcaagcactgctaagggacagactgcctcctcaagtgggtccctgtcccccgtgcctccttactgggagacacctcccagcagggtcaacagacacctcatacaggagtgctccagctggcatgtggcaggtgcccctctgggatgaagcttccagaggaggaacaggcagtaatctttgctgttctgaagccttcgctcatgatgcccaggcaagcagggtctggagtggacctccaggaaactcagcagacctgcagcatagggacctgttagaaggaaaactaacaaacagaaatgaatagcatcaatatcaacaaaaaagacgtccacacaaaaccccatccgaaggttaccaacatcaaagacaaaatgtagataaatccatgaagatgaggaaaaaccagcacaaaaaggctggtaattacaaaaaccagaacgcctcttctcctccaaatgatcacaactcctcacctgtaagggaacaaaactggacagagaatgattttgacaaattgacagaagtaggtttcagaaggtgcataataacaaactcctctgagctaaaggagcatgttctaacccaatgcaacaaagctaagaaccttgaaaaaaaggttagaggaattgctaactagaataaccagtttagagaagaatgtaagtgagctgatgcagctgaaaaacacagcacaagaattttgtgaagcatacacaagtatcaatagccgaactggtcaagtggaagaaagaatatcagagattgaagatcaacttaataaaataaagtgtgaagacaagattagagaaaaaaagaatgtaaaggaacaaacaaagcctccatggtactatgtgaaaagaccaaacctacgtttgattagtgtaactgaaactgacagggagaatggaaccaagttgaaaaacactcttcagaatattaccaggagaacttccccaaccttgcaagagaagccaacattaaaattcaggaaatacagaggacactacaaagatactcctcaagaagagcaaccccaatacacgtaattgtcagattcaccaaggttgaaaagaaggaaaaaatgttaagggcagccagagagaaaggttgggttacccacaaagggaagctcatcagactaacagcagatctctctgcagaaaccctacaagccagaagagagtgggtgccaatattcaacattcttaaagaaaagaattttcaacccagaatttcatatccagccaaactaagcttcataagcaaaggagaaataaaatcctttatagataagcaaatgctgagagattttgtcaccaccaggctttccttacaagagctcctgaaggaagcactaaacatggaaaagaaaaacccacaccagccactgcaaaaacacactaaattgtaaagaccgtcgacactatgaagaaactgcatcaactaacgggcaaaataaccagctaccatcataatgacaggattaaattcgcacataatattaaccttaaatgtaaatgggataaatgccccaattaaaagacacagactggcaaattggataaagagtcaagacccatcagtgtgctgtattcaggagacccatctcatatgcaaagacacacgcaggctcaaaataaagggatgaaggaatatttactaagcaaatggaaagcaaaaaaaagcaggggttggaatcctagtccctgataaaacggactttaaaccaacaaagatcacaaaagacaaaaagggcattaaatgaacgtaaggggatcaatgcaacaagagctaattatcctaaaaatatatgcacccaaaacaggagcacccagattcataaggcaagtacttagagacctacaaagagacttagactcccacacaataatagtgtgagactttaacaccccactgtcaatattaggcagatcaacaagacagaaaattaacaaggatattcaggacttgaactcagctctggaccaagctgacctaatagacatctacagaactctccaccccaaatcaacagactgtgctttcttctcagcaccacatcacacttattctaaaattgaccacataacaggaagtaaaacactcctcaactaatgcaaaacaattgaaatcataataaacagtctctcagaccacagtgcaattaaattagaatgcaggattaagaaactcactcaaaactgcacaactacatggaaactgaacaacctgctcctgaatgactactgggtaaataacaaaattaaggcagaaataaataagttctttgaaaccaatgagaacaaagacacaatgttccagaatctctgggacacaaatgaagcagtgtttagaaggaaatttatagtactaaatgcccacagtagaaagtgggaaagatctaaaatcaacactttaacatcataattaaaagaaatagagaagcaagagcaaacaaattcaaaagctagcagaagacaagaaaaaactaagattagagcaaaactgaaggagacagagactgaaaacccttcaaaaaaaatcaatgaacccaggagctgatttttcgaaaagattaacaaaatacatagaccactagacagactaataaagaagaaaagagagaagaatcaaatagacacaataaaaaatgataaaggtgatatcactgatctcacagaaatacaaactaccatcagaaaatactataaacacctagtgcaaataaactagaaaatctagaagaaattgataaattcttggacacatacactctcccaagagtaaaccaggaagaagttgaatccctgaatagaccaacaacaagttctaaaattgaggcagtaattaatatcctaccaacaaagaaaagcccaggatcagatggattcacagccaaattttaccagaggtacagaggagctggtacaattccttctgaaactattccaaagaatagaaaaagagggactcctccctcactcattttatgaggccagcatcatcctgatacaaaaaactgacagagacacaacaaaaaaagaaaatttctggccaatatccctgatgaacatcaatgcgaaaatcctcaataaaatactggcaaaccgaatccagcagcatatcaaaaagctacccaccacaatcaagtcaacttcatccctgagatgtgaggctggttcaacatacacaaatcaataaatgtaatccagcacataaacagaaccaatgacaaaaacaacatgattatctcaatagaggcagaaaaagccttcaataaaattaaacaccccttcattctaaaaactctcaataaactaggtattgatggaatgtatctcaaaataataagagctatttgtgacaaacccacagccaatagcatactgaatgggcaaaagctgtaagcattccctttgaaaaccgacacaagacaaggataccctctctcaccacttctatttaacatagtattagaagttctagccaggccagtcaggcaagagaatgaaataaagggtattcaaataggaagagaagaagtcaaattgtttctgtttgcagatgacataattgtgtatttagaaaccattgtctcagcccaaaatctccttaagctgataaacaaattcagcaaaatctcaggttacaaaatcaatgtgcaaaaattacaagcattgctatacaccaataatagacaaacagggagccgaatcatgagtgaactcctattcataattgctacaaagagaacaaaatccctaggaatacaacttacaagagatgtgaaggacctcttcaaggagaactacaaaccactgcccaaagaaataaaagtggacacaaacgaatgggaaaacattccatgctcatggataggaagaacaaatatcatgaaaatggccatacttcccaaagtaatttatagattcaatgctatccccatcaaactaccactgactttcttcacagaattagaaaaaactactttaaatttcattctggtaacaaaaaagagcccacatagccaagacaatcctaagcaaaaagaacaaagctggaggcatcacactgcctgacttcaaactatactacaaggatacagtaaccaaaacagcatggtactggtactgagaggtgacagcgtgctggcagtgctcacagccctcgctcactcttggcgcctcctctacctgggctcccactttggcggcacttgaggaaaccttcagcctgccgctgcactgtgggagcccctttctgggctggccaaggctggagccggctccctcagcttgcggagaggtgtggagggagaggcataggcaggaaccggggctgtgcgtggtgcttgtgggcctgcgcgagttccgggtaggcgtgggcttggtggaccccacacttggagcggccagccggccccaccagccctgggcagtgaggggcttagcacctgggccagcagctgctgtgctcaatttctcgccaggccttagctgccttcccacggggcagggcttgggacctgcagcccaccatgcctgagcctcccccaactccctgggctcctgtgcagcccgagcctccccagtgagcaccgccccctgctccacagcgcccagtcccatcaaccacccaagggctgaggagtgtgggtgcacagcatggtactggcaggcagctccacctgcagccctggtgtgggatccactgggtgaagccagctgggctcctgagtctggtggggatgtggagaacctttatgtctagctaagggattgtaaatacaccaatcggcactctgtatctagctcaaggtttgtaaacacaccaatcagcaccttgtgtctagctcagggtttgtgaatgcaccaatcgacactctgtatctagctactctggtggtgacttgaagaacctttgtgtcaacactctgtatctagctaatctggtggggacttggagaacttttgtgtccacctcagggattataaatgcaccaatcagcaccctgtcaaaacagaccacttgactctaccaatcagcaggatgtgggtggggccagataagagaataaaagcaggctgcatgagccagcagtggcaacccgctcgggtccccttccacactgtggaagctttgttctttcgctctttgcagtaaatcttgctgctgctcactctttgggtccacactgcctttatgagctgtaacactcaccgtgaaggtctgcagcttcactcttgaagccagcaagaccacgaacccactgggaggaaagaacaactccagatgtgccaccttaagagctgtaacactcaccgagaaggtctgcagcttcactcctgagccagcgagaccatgaacccaccagaaggccgaacacatccaaacatcagaaggaataaactctggacacgccgcctttaagaactgtaacactcactgcgagggtccatggcttcattcttgaagtcagtgagaccaagaacccaccaattccgggcacattttggtgaccacgaagggactatcacctattgccaagcggtgaggctatcgccaagcagtgagaccattgcctgtcactgtgcggcgagacaattgcttatcgccaagcagtgagtaccatcggacgcttttcacttgctattctgtcctatttttccttaaaattcgagggctaaatactgggcacctgttggccagttaaaagcgactagcacggccgccagactaaagacacgggtgtcaggctttctgggaaagggctctctaacaacccccgactcttcgaagttgggactgttggtttgcctagaaccagcttccacttttcctgtacttctgggctgagccgagggttgacagagaggaaagccatgcagctccggggtcctgacaacaagttggttgaccctgtggccatgagcagaactctcaaaggcatgttgcccaagcgagactctcgcccatctatcctatctatcctgatgcttgccccctgggtcctaatgcctgccagacaaacttcctcttgcctctcttctccgaggttagtcccacttctaaaaattgctacctgtctctggtgcttttctagtttctcctataagaatgatttctagaataaactccaggactctgttaccttctttaggcacccgggctcaccaatcagaaagacataatttttgcccaaagccccatcatagtggggactacctggaattttaggatccctcctcagactaataggcataacaaaagctattcctgaagctaggatatggggagcctcagaaattgtatccttcctattcatataagtgaggacaaaaggtgtcactcttccaaccctggagatcacttccctccctcagggtatggccctccacttcatttttggggcataacatctttataggaaaggggtaaagtcccaatactaacagaagaatgcttaggactctaacaggtttttgagaatgcgtcagtaagggccactaaagccgatttttctcggttggtcctccttgtggtctaggaggacaggcaagggtgcaggttttcgagaatgtgttggtaagggccactaaatccgaccttcctcagttctccatgtggtctgggaggaaaactagtgtttctgctgctgcgtcggtgagcacaactattccgatcagcagggtccagggactgttgcgggttcttgggcaggggttgtttctgctgctgcgtcggtgagcacaactattctgatcagcagggtccagggactgttgcaggttcttgggcagggggaaaaacaaaataaaccaaaaccatgggcggttttgtctttcagatgggaaacactcaggcatcaacaggctcacccttgaaatgcatcctaagccactgggaccaatttgacccacaaaccctgaaaaagaggtggctcattttttttctgcactacggcttgaccccaatattctctttctgatggggaaaaatggccacctgagggaagtacaaattacaatactatcctgcagcttgaccttttctgtgagagggaaagcaaatggaatgaaataccttatgtccaagctttcttttcattgagggagaatacacaactatgcaaagcttgcaatttatgtcccacaggaggacctctcagcttacccccatatcccagcctccctatagctccccttcctattaataataatcctcctctaatctcccctgccggaaggaaacaagcaaagaaatctccaagggaccacaaaaacccctgggctatcggttatgtccccttcaagctgtagggggaggggaatttggcccaacctgggtacatgtccccttctccctctctgatttaaagcagatcaaggtagacctggggaagttttcagatgatcctgataggtacgtagatgtcctacagggtctagggcaaaccttagaccttgcttggagagatgtcatgctactgttagatcaaaccctgtcctttaatgaaaagaatgcagctttagctgcagcccgagagtttggagatacctggtatcttagtcaagtaaatgatagaatgacaaccaaagaaagggacaaattccctactggtcagcaagccatccccagtatggatccccactgggaccttgactccgatcatggggactggagtcataaacatttgttgacctatgttctagaaggactaaggagaattagaaaaaaactgatgaattattcaatgatgtccaccataactcagggaaagaaagaaaaatccctcttccttccttgagcggctacgagaggccttaagaaaatatactcccctgtcacccgaatcactcaagggtcaattgattctaaaagataagtttattacccaatcagctgcagatatcaggagaaagctccaaaagcaagccctgggccctgaacaaaatctagaggcattattaaacctggcaacctcagtattctataatagggaccaagagaaagaggcccaaaaggaaaagcgagatcagagaaaggctgcagccttagtcatggccctcagataaacaaaccttggtggttcagagaggatagaaaatggagcaggccaatcacccggtagggcttgctatcagtgtgatttactaggacacttaaaaagattgtccaatgagaaacaagctgcccccttgtccatgtccactatgctgaggcaatcactggaaggtgcactgtgccagaggatgaaggttccctgggtcagaagcccccaaccagatgatccaacaacaggactgagggtgcccggggcaagcgccagctcatgtcatcaccctcactgagccccaggtatgtttcaccattgagggccatgaaattgacttcctcctgggcactggcatggccttctcagtgttaatctcatgtcctggatgactgtcctcaaggtccgttaccatccgaggaatcctgggatagcctgtaaccaggtacttctcccaccttctcagttgtaattgggagactttgctcttttcacatggctttcttgttatgcctgaaagtcccgcacccttattagggagggatatattagccaaggctggagctattatctacatgaatatggggaacaagttacccatttgttgtcccctacttgaggagggaatcaaccctgaagtctgggcattggaaggacaatttggaagggcaaaaaatgcccgcccagtccaaatcaggttaaaagatcccaccacttttccttatcaaaggcaatatcccttaaggcctgaagctcataaaggatgacagaatattgttaaacatttgaaagctcaaggcttagtaaggaaatgcagcagtccctgcaacaccccaattctaggagtacaaaaaccgaatggtcagtggagactagtgcaagatcttagactcatcaatgaggcagtaattccactatatccagttgtacccaacccctataccctgctctctgaaataccagagaaggcagaatggttcatggttctggacctcaaggatgccttcttctgtattcccctgcactgtgattcccagttcctctttgcttttgaggatcccacagaccacatgtcccaacttacgtggacggtcttgccccaagggtttagggatagccctcatctgtttggtcaggcactggcccaagatctaggccacttctcaagtccaggcactctgatccttcaatatgtggatgatttacttttggctaccagttcggaagcctcgtgccagcaggctactctagatctcttgaactttctagctaatcaagggtacgaggtgtctaggtcgaaggcccagctttgcctaccgcaggttaaatatctaggcctaatcttagccaaagggaccagggccctcagcaaggaacgaatacagcctatactggcttatcgtcaccctaagacattaaaacagttgagggggttccttggaattgctagcttttgccgactatggatccccagatagtgagatagccaggcccctctatactctaatcaaggaaacccagagggcaaatactcatctagtcgaataggaaccagaggcagaaagagccttcaaaaccttaaaacaggccctagtacaagctccagctttaagccttcccacaggacaaaacttctctttatacgtcacagagagagccgggatagctcttggagtccttactcagactcgtgggacaaccccacaaccagtggcatagctaagtaaggaaattgatgtagtagcaaaaggctagcctcactgtttaagcatagttgcagcagtggccgtcttagtgtcagaggctatcaaaataatacaaggaaagggtctcactgtctggactactcatgatgtaaatggcatacgaggtgccaaaggaagtttatggctatcagacaaccacctacttagataccaggcactcctccttgagggaccagtgtttcaaatacacacgtgtgtggccctcaaccctgccacttttctcccagaggacggggaaacaatcgagcatgactgccaacaaattatagtccagactcacaccgcctgagatgagctcttagaagtccccttaactaatcctgacctttacctatataccaatggaagttcatttgtggagaatgggatacgaagggcaggttacaccatagttagtgatgtaaccatacttgagagtaagcctcctcccccagggaccagtgcccagttagcagaactagtggcacttacccaagccttagaactgggaaagggaaaaagaataaacgtgtatacagatagcaagtatgcttatctaatcctatatgcccatgctgcaatatggaaagagagggagttcctaacctctgggggaacccccatcaaataccacaaggaaattatagagttattgcacacaatgcaaaaacacaagggggtggcactcttacactgccaaagccatcaaaatgggaagaagaggggagagcagcagcataagcggctggcagaggcagggaaagatcagcaagaaggaaagagagaaagagaaagtcagagaaagagagagaggaagaaacagagagaaagaaagagacaggaagtcaaagagacagagaaggagacagagaggaagaagtcaaagagaaagagaaagagagacaaaggagaagtcaaagagaaagagaaagagagatggaagtagtaaagaaaaaaaaacagtgtaccctattcctttaaaacccagggtaaatgtctatctacccagccaaggcatattctacttatgtggatcttcaacccatatctgcctctcagacagtttgcaagaaataatgaaatctatccttactttacagtcccaaatagactctttggtagcagtgactctccaaaaccgccaaggcctagacctcctcactgctgaaaaaggatgactctgcaccttcttagggcaagagtgttgtttttacactaaccagtcagggatagtacgaaatgccgcccggtgtttacaggaaaaggcttctgaaatcagacatctttcaaactcttatacaagcctctggagttgggcaacatggcttctcctctttctaggggagcagtggagggagaggtgcgggcaggaaccggggctgcatgcggtgcttgtgggccagcgcgagttccaggtggcatgggcttggtggaccccacactcggagcggccggccggccccaccggccctgggcagtgaggggcttagcacctgggccagcagctgctgtgctcaatttctcgccaggccttagctgccttcccacggggcagggcttgggacctgcagcccaccatgcctgagcctcccccaactccctgggctcctgtgcagcccgagcctccccgacgagcgctgccccctgctccacggcacacagtcccatcaaccacccaagggctgaggagtgcgggctcacggcacgggaccggcagccagctccaccagcagccccggcgtgggatccactgggtgaagccagctgggctcctgagtctggtggggatgtggagaacctttatgtctagctaagggattgtaaatacaccaatcggcactctgtatctagctcaaggtttgtaaacacaccaatcagcaccctgtgtctagctcagggtttgtgagtgcaccagtcgacactctgtatctagctgctttggtggggccttggagaaccattatgtctagctaagggattgtaaatacaccagtcggcactctatatctagctcaaggtttgtaaacacaccaatcagcaccctgtgtctagctcagggtttgtgaatgcaccaatcgacactctgtatctcgctactctggtggtgacttggagaacctttgtgtcgacactctgtatctagctaatctggtggggacgtggagaacttttgtgtctacctcagggattgtaaatgcaccaatcagcgccctgtcaaaacagacaacttggctctaccaatcagcaggatgtgggtggggccagataagagaataaaagcaggctgcatgagccagcagtggcaacccgcttgggtccccttccacgctgtggaagctttgttctttcactgtttgcaataaatcttgctgctgctcactctttgggtccacactgcctttatgagctgtaacactcactgcgaaggtctgcagcttcactcttgaagccagcaagactacgaacccactgggaggaacaaacaactccagatgggccaccttaagagctgtaacactcaccgagaaggtttgcagcttcactcctgagccagcgagaccacgaacccaccagaaggctgaacacatccgaacatcagaaggaacgaactccggacacaccacctttaagaactgtaacactcaccgcgagggtccgcggcttcattcttgaagtcagtgagaccaagaacccaccaattccggacacagtaccaagacagatatatagaccaatggaacagaacagagccctcagaaataataccacacatctacaaccatctgatctttgacaaacctgacaaaaacaagaaatgcagaaaggattccctgtttaataaatggtgttgggaaaactggctagccatatgcagaaaactgaaactggatcccttccttacaccttatacaaaaattaactcaagatggattaaagacttaaatgtgagacctaaaactataaaagccctagaagaaaacctaggcaataccattcaggacataggcatgggcaaagacttcatgactaaaacaccaaactcagtggcaacaaaagccaaaattgacaaatttgatataattaaactaaagagcttctgcagaacaaaagaaactatcatcagagtgaacaggaaacctacagagtgggagaaagttttgcaatctatccatctgacatagggctaatatccagaatctacaaggaacttcaaaaaatttacaagaaaaaatcaaccccatcaaaaagtggacaaaggatatgaacagacaattctcaaaagaagacatttatgtggacaacaaatgtatgaaaagaagctcatcatcactggtcattagagaaatgcaaatcaaaaccacaatgagataccatctcatgccagttagaatggtgatcattaaacagtcaggaaacaacagatgctggagaggatgtggagaaataggaatgcttttacactgttggtgggagtgtaaattagttcaaccactgtggaagacagtgtggcgattcctcaaggatctagaaccagaaataccatttgacccagcaatcccattactaggtatgtacccaaaggattataaatcattctactatagacacatgcacacatatgtttattgcagcactgttcacagcagcaaagacttggaaccaacccaaatacccatcaatgatagactggataaagaaaatgtggcacatatacaccatggaatactatgcagccataaaaaatgatgagttcatgtccttttcagggacttggatgaagctggaaaccatcattctcagcaaactaacacaggaacggaaaactaaacaccgcatgttctcactcataagtgggagttgaataatgagaacacatggacacagggaggggaacatcatacaccagggcctgttgcggggtggagagctaggggagggatagcattaggagaaacacctaatgtagatgataggttgatgggtgcagcaaaccaccatggcatgtgtatacctatttaacaaacctacacgttctgcacatgtatcacagaacttaaagtgtaatttttttaaaaaacatcacttttaggtggtatgttatctactgatgaagaggaaggctataatcacaagctccttagtgagcaatagggggagggtatctgatggtatagaaaggagaatggggtggcactagagaccaatttaaaccacttcacaattgggcctgaccccagctttggtttgaaaccgagggcaggagcagccaggcagcaacgtcttttcctgtcttcaagcacaggaaatcagttagattgacctgacatacttggatgataaacagtggcaggctttcccaggcagcattgtacttcttcccctgttaacacctcccactgtggaaaaatctaaacaaactagaattaacaggaatccaacatcttcttttctatagcgaaaagtttccttgcctaactcatttaggagactttttgggaagttagaaagttggaaaaagaaaagcttcacatcagtgcatagctgtttttaacttctatgtgttgaaaaagcatatctgatcaaaatttttacctattatgcatttgatatataaataagtatataaatgcacacacagacacagcaatgatggtgaacagtcttcatacaattatatggatgaatctcataaaatgctgagttaaagaaatcagaccaaagaacatatactgaaagattctctctatatacaaagttcaaaaataggtggaccaattcatggtggtgttagaaatcagaagagaggctacctttgtggggaggggacagtttaatgcccagaagcggtaaataaggaatcctctggggagtggtaatgatctggatgctggctacaggatgtgttggttgtaaaaatgcatttttttatatctagctttttccatgtgtatattatacttcaaagaagttcagttaataatttctcatgtcactgtagagtagctcagttagccccagcaagcctctggcttaatcttgttttaccttaagccatcagtcatttacaagtaggaaaattcacagggaaagttagagtataaaatccagaatgaaggtttactgggtaagagtctctccattttccaaagcccgtttatttcttgattccagttcttaagaagtctcagcattgtgtctttttcatgtatcttacaagaagacagcatgtgcttctaacacctgatacattgtatctaccagcacttggtaaacagaaaagaaccacatttttcttgtaggagaaatttggtgcctatttcctaccaggcaccaataagtgggaccaataggtgggattaaagatacagtagaaagtatttaaaacttgccagggggcaatagtctgaaaataagtaaattggtgctatagaatggaagttacaggcttctttcttttttcccacaagatctgctccttgagcccctagagacttttctgtctgttactgtttcttcattcctcatctgcagagccagccctgagaagtgcagaccaaagccagggaaggctctgcaaagatgtacaaatggaagtcaccttaataacctctgactgctgcgcataatacatttcactcaaaagaggggttaaacaatggaacagaatacagaggccagaaataatgctgaacactgacaaccatctgatctttgacaaaatccacaaaaacaagcaatggagaaaggactccctattccataatggtgctgggataactgtctagctatatacagaagattgaacctgggccccttccttacatcatatacaaaaaataactcaagatggagtaaagacttaaatctaaaaccaaacactataaaaaccctggaagatagcctgggaaataccattctggacataggacctggcaaagacttcatgacaagacaccaaaagcaatagcaacaaaaaccaaattgactaatgaaactaatgaaactctttagttgtacaacagatagtttatctgtacaacaaaataaactatcaacagagtaaacaacctacagaatggaaaaattttttgcaaactatgcatctgacaaaggtctaatatccagaatctataaggaatttaaacaaatttacaagcaaaaaaatgacctcattaaaaagtgggcaaaggacatgaacagatgcttttcaaaataagacattcacacatccaacaaccatatgaaaagatgtttaacatcactaatcattagaggaatacaaatcaaaagcataataagataccatctaataccagtaggaatgactactattaaaaagtcagacaataacagatgctggtgaaggttgtggagaaaagggaatgtttatgcactgctagtgggaatgtaaactagttcagccattgtggaagagagtgtggtgattcctcaaagaatgtaaaaccgaactgcctttcaatccagcaatcccattattggatatacaccaaaaggaatagaaattgttttaccgtaaaggcgcatgcatgcatatgttcattacagcactatttacgatagcaaagacatggaatcgtctaaatgcccatcagtggtagactagctaaaaaaaaaaaaatgtggtacatatacatcacagaatagtatgcagccataaaaatgaacaagatcatcatgtcctttgcagcaacatggatgtagttggaggccattatcctaagcaaattaatgcaggaacagaaagccaaataccacatgttctcatttataagtgacagctaaatattgagtacacatggacacaaagaagggaacaatagacatgggacctacttgagaatagagggtgggaggagggtgaggatcaaaaagtacccataggacactgtgcttattacctgggtgatgaaataatttgcacaccaaacccctgtgacacacaatttacctatatagaaaacctgtgcatgtacccctgaacctaaaagttaatggtgggggggtggggttaagctactttgtggtataaatctgagcattcatattaaaataaaatatttacctcattagagtaattaacatttattaagcaaagagccaagtaccttacacacatgatgtttaatctcacaatgatctttaatctcataacaaccgtccattgtatgtacatatgtggaaattgagccttggagagattaaatgcatggggcatgccatttgactagaaactggaagcatcaggatttaaactcagttctgaatggttttgtaggctttgttttttccacattatagcatggcctgccatgaagaacaggtcctttctggtgtttgtcttgtttggtttaagtgaagcaaatatttatttaaatattcaagatatgctgttaaatttttactcaaaaatttgagtacagtatggatcttctgaagccaaataactcttattcaatgcttagttgagaaattttatggagtagttctcaatttttatgtagttccactgcaaaggtaagtcttatggaaagattcactgtaattttttttcctcatttggacatcagctttttcttttcctcagacccgctgaaagataatttttaaaataaaaaccttgtttttatatcaagtggggacattttttccaaatgaaaaccgtgtattcattttatatgataaaatcaatgttattatttttaaaattttgatttaaaaatcattaaaaataaattttcagatattacctgaaattctaccatccagagataatagtgcttaaagatttgatatatagacacacacacatatatacatatatatcatcctaaacttctttgtataaatgtatataaagtttttaataaaaactaggagattaatgccctttgaatgaaaataaatacaatgtgtatgctttaacatcttgcctttactttataacatttatcacagcagtcatgagataatgatttacatggtcattgttagtaagctaatagctaagtgcatgaactctggagctagcctccctggattttaatcccagatctgtcactgaccagctgagcaatactaggtaaattgctcttgttccttagtttcttcatctgtaaaatagagataaaaataatatccacctcataggattggtgtgagcattaaatgagcatacgtatgtaggccacttaacaacaatgccttcacatactgaacacaaatatacgagctgttgtcttattgggctcatgtttttcctaccactaagccgcatgcatgcaaggaccatgttggttttgttccacattgcatccccaacctggtatacagtgtgcattcaatagttgttgactattattactagtggcatttaacaaatatctgttaaatgagtgaagaaatacccatttactgcaagtgtgtctaatattgatggcataatgggggaaactcaaactctggagtcaaacaggttttaaaaccttattccctcatcctcagttattgacgttttttttttggcaggtgtgtgtgtgggacaacttattgaacttttctgaatttccagcttcgcatatataaaatagagatagtgattcattcttgcaatgtatggatttgagacaattgtgtaagtttatcaataaatagtagctatttttgtataagtattacatataatatccaggccactgctttgcataacccaaaaggggcaccattcatgcagaatacaacataaatggtgtccctggagcagtgcagtataggaaccctgaggggacctacagtatactttatagttcatagattacaaattatccctttatcagagtctctcaaggttggatgtatttgaggtccataagagcaatttaggattaacagtagctgcagaaaccatctgcagtgatattctcattttaaatccgcgggaaagaagacagctataaacttgggacctgggtttaagcattttaaatgccaagttcaccattttctaaaacacaacaaatacccagtgagagagggagaagggaagtaaatgcctctgaataagcaagttaatgtcagtagttgtactgtatgcatattgatgaacaatagaggaaccaatgtccaatcagatgagcaggatatttggcaataacaagttgcctttgaggaaaaatgattttcttggcaagttctttatcagcattacaaagctaaaagctacgcttatcatcacttatactagcataccctgttgtgcaaatgctgtctgtgtttgcatctgctattgttgatgcctggtgcatgaatcaggactccagcccacaagttttcccagaactttcttatggccatcatctttaagtgtctggtgaacagtcatagtttggtacacaaaagggtcaacctgggggatggctagggtttgactcagtcgttacatttcaatagagcaggaaggggaaatggtggcctgtaacctcagggaattttgccagttggtccaccccactctctctctcctgctctgaggaagtggcacagcctagaacagcaccacaggtgagagaaatgcaaaccctaaccagagaagcagactctttgccagtagtaatagttcaggaccaccaccagcttttattaaaatttttaataacactcaagtattggcagaaagaaataatcttgggttaactataactagaatattgactcttcctctgtggaagaatcagccaatcacatttgtttacatcagttcccctgaagaagaaaaatacactgatgttgcagcaagacaaatttaagctagatgtaaataacttcctttagcctgtaatgctaggctaattacatattggaactattttttcagggaagaattgtgtagggtttcagggaagaattctgaagaaaatatagagctgaaatgatcttgcagctcactgaaactgcagggtttagatccacactgatactcgttctattatcactgtaatgaaggctgatggaataagtaaaaatgttttgtattagtatgtttttacacttatttgcaaggcataaataggttaggttttgatcttaatttaattctaacatgtattgtgcacaagctgtgagcagttttcaggagttaggtatctggccatgactgatttttcaggagttaatcatctggtagaagggtcatacacaataggaagatgtgtgtgacaggttgtgatcattactataatcacacagagagctgtagaattttaggctggcagggtggctcacgcctgtaatcccagcactttgggaggccaaggcaggcggatcaagaggtcaggagatggagaccatcctggctaacacggtgaaaccccgtctgtactaaaaatacaaaaaaaaaaaaaagccaggcgtggtggtgggcgcctgtagtcccagctacttgggaggctgaggcaggagaatggcgtgaacccgggaggtggagcttgcagtgagccgagatcgcatcactgcaatccaacctgggcgacagagggagactcagtctcaaaaaaaaaaaaaaaaaaaagtcatgttagatccagaggggtagcaactggggctgggctgtcagtcaactcagtcaactcagtcaactctgctcccccacaggagatgccagtgatgcattttcatggccaacattgtcagtcagcatcattgaattactcctgattatagagacacagctgcaaacgattccccattaaatatgatgtttcttgcaatgtttggaaggtactcctttttagtaagggaaatcccctcttctggcttgctgaaagttttttctttccattttaaaaatcgtgaattcctttttgcaatattgaggtggttatatggtttctcttctctaatctgttaatatggtgatttaatggttagaaattttctaatgtaaattccactcatattgcagaaataaacctaaactgagcatgaggctatattttttatttgcttctatatttggttgctatacagtattatgtttaagatttgttcacatatatttgtgaatgggattggactatttttccttcttgccgatttttatctggtttttaaattaaggatattttagacttatgaaatatttggcaaacaatccttggcaagtaattttttggggaatttgttttggctattttgagtattacccaatatattttaattaagttattcttaatgttttcttaattaaaaaaattacctactctagagatattctttatgtactccagattttgtctatttataccacttttcttttttcctcgatgagtgtcatagatgttcatctatttttttatcttctttgatcttctcttattccttgtttctattaacttctgaagtttattattttcttttttccacttccttatggtttattctttcaatttttctctaacttcttaagttgggtgtttaatttttagcttgctttgcttttttaggataagcattaaaactacaaattttccttgttattcttttgctgcaccccaaattgttgatatttctattgtctaatttctattcaattagaatactttaaagtttctttttggtttttaaaaactaactttttaaattgacaaataaaaattgtgtatatttattgtgcacagcatatggctttgaaatatatgtacattgtggaatggctaaatttagcttattaatgtatgcattatctcacatacttatcattttttgtggtgagagctatgtgacttttgaacttatgagttatttaaatatttttaaattattaagcatattgggattttaagtaatttacctttttattattaacttataacaagtagaacagttaacctgtatgattctacatcattgaaatttattgacatttgcttcatagtctattatatggtctacttttgttcatgttacatctgtagtagaattggctaatagttgagtaaagtacacatatgtctatgaaatcaagtgtaatccagagaaaaagagaaatttactgaatatattgttctaggtgctattatatgttgtcatgtttaatcctcaccacaattgtatgaggcagccataattaattccactttacacatgaggagcctgagggttaaaaaaaaagctagctctactatttgtaaagaatgaagcaaagatacaaatgaaggcccacatatcctataactagatatttaagcattttaattcaagctttaaaactgctaaataaaatgtgctccaatttctatattgacagacataccttcctaatgagctggggttcgaatttagaaatctttgatgcttcagagtccacactgaaatgtggaggcacatagtgagttggtccccagccttcagtccacccaccttctctttactaaatcacctttcacatacatgtatgaacaccccagcctccaagtccaaaccctaaacaaaatgggacacccttgtgcatacacagagacacagcccatcctcaggaaaacctggaaaagtccatacaagttctggaagcaagcttgggacggtttcagtagtgtggtctataagggaggcctcagaagacaggttttcttaattctgtgaacttctcccacagtagaaagggtgctggaggagggtcagagtgaggacttctaaagcatgggtcctgagtaggggccactcttgcccaagtctaagaagggtactagaatagcacactactactagatactagaacccagatacaagcacaggtcttctgaaattaataataataataactattaccattattataccagtagctgtcatttatttagtgcttattatttgccagtcactgttctaaattctttacatgtattatacaactgccatataactgccatatgagggatgtaccctcattgtcaccattttaccgatgagaaaactggcataaaacgtttaagtaacttgtccaagttacagagcttagtgaagccacaatgttgctcaatttgctctcaaacttcaaagggatgggaaggacacctaagtcatagagtctttaagaatcagagctagaaggaatcttagatgttatctagtcagcctcctcccattacagtccaagagaagatggccctgagttacttgtagctatttttgcatgtgaattgcaagtgaatatacattctactgaagataaaagatatttaaagatatcgctggatataggaacagtggttttaaatctctaggctttaacttttctcagaacaagaaatcctttttggttttaatctatatgcacatctgtatttttctcaattatcgggtagtaaaatataacttttcttctgtaatattttttaactttaatgagtgttcctcataatagaaaagtttggaaaccattgctatgggtatatactttctaaagggatagtaatttctctagaatattcatttaatgctccagaagtaattagcacaattgtgcaagtctgtgcatcatcaactatacattctgcctgtttactccaaatccacatgaaactgattatacagtcaaaggcgagcccagtggagaggcatttttggagacttcctggtacattgagacagggtcggccagtctgcgttagggtcttggtcaaaactgcatttctgaaactaaactcagattgctttcttttaaggggtcagaactgattcaaatctacatttttaaaagccttagatgtggggcttttcctattcccagtctccgctattggtctttgtgaatccacaggcaatttggccacatccttgactctctcttatattaagaattaaacagctaagttcatgcagaggaaatataacaaaggagggactttcctacaagatctttgaaaaatggaacatttgcataagtcatatttagccagaactgttgttttatattttcctttctgaatactttgttacacctcctcccagccaaccccccccctccctgaccccaactagtcagagaccaaagccttcacaatggtttacacttgaaccttcctggccccaccctcatcatcacgcctgaataattacattcactgactggtctcccctgcttccgtttatctccactcctaaaccctctgacaccttaatcttcccagaataccattgtgatcctgttccactcttgctcaagttttcccagaaactagagtacaaactttataagctttagagttgaaagccactctatctctttttcatccccaggtctctgccaaggcagtataacctgtccaacatctctaacttcaatacctttgtcttagatactagactctcctcctggtttctaattaaacctgatctaggatctaattttgcctctgaattctgttgccctttgccaagtgatctcttcctcctctgagccgcagcatctctgagcttgcacacttagcatagccatagcacacacagccttagcttgcagttcagggtgtttaccttccctccccttccagatgctggatccccagggataggaactctgcccttatgtgtccatagcccctggtagtatgtcttgcagtcgtacattttcagcaaatgtttaattggttaattgaagacaactgtcccatgccttaagcctctctttttgctaaacatgcctgtgtcctttgtcattgaacaactattttgatctattttcttcctgacataggggtcagttccgaggatgctgaaatcaagagacatagcttattctctcaaaattgctttcaagagtgattttgttgtgaattgagaactggctgcctacttttggactacccacttcagcaagagtgtttgaaaccaaatctattctaagtaattttttattcccttttctctatggcattagacacacagctcttttaaactacctttcgttatctattaaacagacattcagtaactctatagacactgtctagctatatgaacttagacaaactaatatctctgagcttcagtttcttaaaatttaaaatgaggacaataccatctatggccggggattaaatgctatgaggaatgtaaaccagatgtcaggtaccatctctctaaaatccagataaaatgaattaaaaatactggccgcaaaccctctctaagagttctcaaaattctcagagagcttaattttcatgctcaccatagcaccgattttcttctaaatattttgtttctaccaaaatattttgtcccaattttgccttttatggctatttcttcatatccactttcccaaactaaagaagcagccccttcaccttaaactcctccttcaaagcaacctaaatacaggtctgggtttgtattcctagtgggatgttacagaggttagtgtgatgcagaggaggagtcatgctgtttaaatccatactagtccccagaggccaggctgcttctgccacccctacccctcccgccacagagctcttcagcttctcacatttctagttcttctctctctactttcattaccttctctctttttttttttcttctcatgtgctcacgggagcagagaaaattaactcctctaagttttcttaacacagagtgccttaattacatattactattgtttgagttcctgccaacactacgtctgtagggtcacacctgctatattagaggcttatcaaaaaaagatagctttctcctaaaaagggatttggatgcctactaagataactggatgccaagataagtttaacctaacaaactttattattattattattattattattagagataggtacttattctgtcacccagactgcagtgcagggatgcaataatagctcactgcagcctcaaagtcctgagttcatgcaatccttctgcttcagctccctgagtagctaggactacaggcatatgctactctgcccagctacttttaaaaaaataattagggatggggtcttgttgtattgcccaggctcgtctcaaacttctggtttcaagcaatcctcctgccttttacctccctaattgttggagttacaggcatgagccacagcactcaaccaagatttaaaaacttttaaaagaaatcacattacttactgttatcatcattatggttactaccagtgttaaaacaattggtattgaaaacaccactaccagatcaagcttcaaaccaagatgtcaagtaaatattattgtcagacctctgagcccaagcctgcaggtatacacccagatggcctgaagcaagtgaagaatcacaaaagaactgaaaatggccggttcctgccttaactgatgacattccaccattgtgatttgttcctgccccaccttgactgagggattaaccttgtgaaattccttcccctggctcagaagctccccgactgagtaccttgtgacccccacccctgcccacaagtgaaaaaccccctttgactgtaattttccactacccacccaaatcctataaaacagcctcacccctatctcccttcgctgactctcttttcagactcaacctgcctgcacctaggtgattcaaaagctttattgctcacacaaagcctgtttggtggtctcttcacacagaccatgtgacatttggtgccgtaactcagatcggggaacctcccttgggagatcagtcccctgtcatcctgctctttgctccatgagaaagatccacctatgacctctggtcctcagaccaaccagcccaaggaacatctcaccaattttaaattgggtaagtggcctctttttactctcttctccagcctctctcactatccctcaacatctttctcctttcaatcttggcaccacgcttcaatctctcccttcccttaatttcagttcctttctttttctggtagagacagaggaaacgtgttctatctgtgaacccaaaactccagcactggtcatggacttggaaagacagtcttcccttgatgtttaatcactgcagggatgcctgcctgattattcacccacatttcagagctgtctgatcactgcagggacgcctgcctggatccttcaccttagtggcaagtaccactttgcctgggtggcaagcaccacctctcctggggggcaagcaccacctctcctggggggcaagtaccccccaaccccttctctccatgtctccaccctctcttctctgggcttgcctccttcactatgggccaccttccaccctccattcctcccttttctcccttagcctgtgttctcaagaacttaaaacctcttcaactcacgtctgacctaaaacctaaatgccttactttcttctgcaataccgcttgaccccaatacaaactcaacaatggttccaaatagcctgaaaacggcactttcaatttctccatcccacaagatctaaataattcttgtcgtaaaatggacaaatggtctgaggtgcctgacatctgggcattcttttacacgtcggtccctccctagtctctgttcccaatgcaactcatcccaaatcctccttctttccctcctgcctgtcccctcagtcccaaccccaagtgtcgctgagtctttccaatcttccttttctactgacccatctgacctctcccctcttccccagactgctcctcctcaggtcgctccccgccaggctgaatcaggctccaattcttcctcagcgtccgctcctccaccctataatccttctatcacctcccctcctcacacctggtccagcttacagtttcattctgtgactagccctcccccacctgcccaacaatttcctcttaaagaggtggctggagctaaaggcatagtcaaggttaatgctcctttttctttatccaacctctcccatctcagttagtatttaggctttttttcatcaaatatgaatacctagcccactccatggctcatttggcagcaactcctagacattttacagccttggacccagaggggccagaaggtcatcttattctcaatatgcattttattacccaatccactcccaacattagaaaaagctccaaaagttagactccggccctcaaaccccacaacaggacttaattaaccttgccttcaaagcgtacaataatagagtagaggcagccaagtagcaacatatttctgagttgcaattccttgcctccactgtgagagaaaccccagccacatctccagtacacaagaacttcaaaatgcctaagccacagtggtcaagcattcctacaggacctcctccatcaggatcttgcttcaagtgccagaaatctggccactgggccaaggaatgccctcagcctgggattcctcctaagccatgttccatctgtgtgggaccccactggaaatcggactgtccaacttgcccagcacccactcccagagcccctggaactctggcccaaggctctctgactgactccttcccagatcttcttggcttagtggctgaagactgatgctgcctgatcgcctcagaagcctcctggaccatcacagatgcttttggtaactcttacagtggagggtaagtccgtccccttcttaatcaatgcagaggctacccactccacattaccttctcttcaaggtcctgtttcccttgtcttcataaatgttgtgggtattgatggccaggcttctaaaccccttaaaactccccaactctggtgccgatttaaacaacattcttttatacacttctttttagttatccccacctgcccagttcccttattaggctgagacattttaaccaaattatttgcttccctgactattcctggactacagccacatctcattgctgcccttcttcccaacccaaaagtggcaactcctttgccacttcctctcatatccccctaccttaacccacaggtatgggacacctctactccctccctggcaacaaatcacaccctcattactatcccattaaaacctaatcacccttacctgggtcaacgccagtatcccatcccacaacaggctttaaagggattaaagcctgttatcacttgcctgttacaacatgtccttttaaagcctgtaaactctccttacaattcccccattttacctgtccaaaaactggacatgccttacaggttagttcaggatctgtgccttatcaaccaaattgtcttgcctatccacgccatggtgccaaacccatatactctcctatcctcaatacctccctccaaaacccctccataacccttattctgttctggatctcaaaacatgctttctttactattcatttgcacccttcatcccagcctctcttcactttcacttggactgaccctgacacccatcagcctcagcaacttacctgggctgtactgccgcaaggcttcatggacagcccccattacctcagtcaacccaaatttcttcttcatccattacctatccaggcatagttcttcatgaaaacacacgtgctctccctgctgatcatgtccagctaatctccccaaccccaggactggcaaattgactttactcacatgccccaaatcaggacactaaagtacctcttggtctgggtagacactttcactggataggtagatgcctttcccacagggcctaagaaggccaccgtggtcatttcttcccttctgtcagacataattccttggtttggccttcccacctctatacagtctgataatggacaagcctttactagtcaaagcacgcaagcagtttctcaggctcttggtattcagtgaaaccttcataccccttaccgtcctcaatccttaggaaaggtagaactgattaatggtcttttaaaaacacacctcaccaagctcagcctccaacttaaaaaggactggacagtacttttaccacttgccattctcagaattcgggcctgtcctcgaaatgctacaaggtacagcccatttaagattctgtatggacgctcctttttattaggccccagtctcattccagacaccagcccaacttgaactgtgccccaaaaacttgtcatccctacaatcttctgtctagtcatactcctattcaccattctcaactacttgtaaatgccctgcccttttttacagtgctgatttatacttttcctccaaaccatcataactgatatctcctggttttacctcaaaccgccacccttaagtctctcttaaagtggatagaagatcttcagtgacaaggtacactccaatactttcaccctaataaagccctattctttacttttatattcactcttattcttgttcccattcttatgccactctctacctctccccagctatctccaccacactatcaatctcactcactctctcctagccatttctaatccttctttaacaaacaattgctggctttacaatttctctttcctccaaaatcaccgagtcctcaatttactcactgctaaaaaaggggactctgcatatttttaaatgaagagtgttgtttttacctaaatcaatctggcctggtatatgacaacataaaaaaaactcaaggatagagccaaaaaccttgccaaccaagcaagtaattatgctgaacccccttgggcactctaattagatgtcctgggttctcccgattcttaatcctttaatacctgtttttctccttctcttatgcagaccttgtgtcttccatttagtttctcaattcatacaaaaccgtatccaggccatcaccaatcattctatacgacaaatgttttaagggaggagaccacccctcatattgtcttatgcccaatttctgcctccaaagaaagaagtaaaaatgaaaaggcagaaatgaaatccacaggcagacagcctgatgccacaccctgggcctggtggttaagatcaacccctgacctaatcagttatgttatctatagattacagacattgtatggaaaagcactgtgaaaatccctgtcttgttctgttcctctaattaccagtacacgcagcccctagtcatgtaccccctgcttgctccccctgcttgctcaatcagtcatgaccctctcacgcagacccccttagagttgtaagcccttaagaggaaaaggaattgttcactcggagagctcggtttttgagacatgagtcttgccaatgctcccagctgaataaagcccttccttctttaactcagtgtctgaggggttttgtctgtgtcttgtcctgctacagtttcatctaacaaccccataatatcaccccttaccacaaaatcttccttcagcttaatctctcccactctaggttctcacgccacccctaatcctgctcgaagcagccctgagaaacatcgcccgttatctctccacaccacccccaaaaattttcactgccccaacactttaccactatttcgttttatttttcttattaatataagaagatagaaatgtcaggcctctgagcccaagcctgcacgtatacatccacatggcctgaagcaagtgaagaatcacaaaagaagtgaaaatggctggttcctgccttaactgatgatattccaccattgtgatttgttcctgcgccaccttgactgagggattaaccttgtgaaattccttcccctggctcagaagctcccccactgagcaccttgtgacccccacccctacccacaagtgaaaaaccccctttgactgtaattttccactacccacccaaatcctataaaacagccccaccccatctccctttgctgactctatttttggactcagcccacctgcacccaggtgattcaaaagcttcattgctcacacaaagcctgtttggtggtctcttcacaccgacacgcgtgataattattatattacttttaactaaaaccctttcagagtctcgcagggaaggctgtatatatctcataaaatgttggggcccactggatcagacaaggccacaaaggccaaagggaagtaaagatctcattatttctcctaataatttccctgtcctttgtcataaatggtgggtaggctgttatggtgatggcagattttctttccataaaatgtccataataggacatttgaacagaagggaaaaatcaaattgctgaagttgaaagagggcaatgcaaagaactttggagaaagaactgtacagagaagtcaactggcagatgggaggaagtttaaggggaaaaatatagatgtctaaagaatacatttattcattttccacagtgcaatttggacaagaagcctctttcttgcttctttctattctcattaaatcattagagctcaagcaatccttctgcctcagcttcccgactagctaggactacaggtatgtgctactatgcccagctaattttttaaaaattagattttaatttggtgaactatttctgtaggaaactacaataatacagcccaggcacattgatcttgggtgaacaaatcagaaggaatgaataattctgtgttcctgggactctgacaatttcatgaacttggtactctgagtaaagcataggaggagttatttcataaaatgtggagcacaatcatgtgacaaagataatgggatccccatttcataaataaatctgaagttcagagagagtaacaactggccagggtcacatcacggagacagaggcagggttcccactgatgcctctgactccctgtcccaggcccttcctcctcccgcaagcagaagtgcagggggcagagctgaccctgtgcagtgaaaatctgagggctgagttcctattggaacacaagtgaaagacttcctggcttctaatctcaggataaggactcagagctccatctgttccagccttaggataagaaccagaatcttacaccatgaaagcatgaaaggtaagatttgagtgaggaaaaaaaaaaaaaaagtctgtgtttcagattcagttcacaaagcagtttcatacttaaggtaccatcacaataaccctgtggggtaagcaaggcaaatttcattcttgttttatgggcataggaagtaagtctcagggaggttaagaccaaggtttctggagaattttatattatgaatcttgatttatgggattactattatgtaattcctaagatcatataggaatcctagagcttgaatatagaactttatttttaaatctatatacatcataattacaaggagtagtgtccatttgggttccttggccctgatgtgttagtggaataaacatttttgtcagggttgccatgtgtgtctgtgcacgtgtgcactgtacacctccaggggatgtaccctaaaccacatgaatgtgatttgcacatccaagatttacagtgtactatagggagaatcttttgcaacagcttttgctataatacagaatctgagatgtctttgagaaagaaaagtgtaatcattaccaaaaaattattctcataatgtgtgcaaatttgtatgaaatctatattggccatgggacaaggaggtatttccagctagcttctgaaagggctctattctctcataagaattcagctgttgacattaggtgatatctgcccaggtcatcagatgccatagagaaagagggtttgctgaaacttatatcagcagtgcactgtatgctctttctgatttatttgaacattcatttattgagtgtcaagtaatgcactagatactccagggatctgacacaaactctgccctgaaggagcatgtaatctcactggggagaaaacaaaacatatgataatttcaaaataacaaactaggcaaactagttaacacttaaaaagcaggctttattcaaatgcaaaattgcatgttacagggtaacctttcagtaagaagccaggaagaggagctcatcatgggttggattagtaaaggactagttataaaagaagtggtggggttgagggaggcctgagatgaaatttaaagaatatgtagaatctaggtaagtggataaaaggtctgggggcaggggaaaggagagcatttcattgtgaatcaaggaatttctccacctgttttaactcttccatatgacatcaaagagatgtcacttgcagctagcatttcagtgatgttttcttactaataatatcgtgataaaagaaacattgactataagaaataggaatgggtctcataaaaggaaacagcaaaacccccaaactaaaaaacagcgcaggctatttctctcttctctccttttgcttggcactcatgagatgctaggtgtggaagtcagccaactgaaaaagagaggtggctgaagaaggtggggaggctgaagccagttaaataggatggtccaattcacagacggcgaggctacagtgcaaataggactctttcaacttgagcaggaccccattacttcactggagttagaaagaaaggagagcgtagactttttgaactttctataagagtgtacctccacagtatacagaagacgacgtgaaatttgatctgcaagaaaactgagtccatattcacatatgtatcaaatttgcacttcatttagaagtgtctgtcatcaagtacagcactgaattgaaactgaaaacaagagtcaagaaagagcaaagtcagccatctttatattccacatgaatcctttccctttatggtcttatttgtttctcctcagaaaagacaaaaagctgagctgtataaacacctgtgggctgggggttgagggataaatgaggggcgaaatggaagctgaaggaactgttggtcaggtagaaatcttcccagatgcactgaaggaaacacacttcatgtttgacgtaggaggtgccaccacacaaaacgtttcatggaaggatttaaaggatctcatgatttttagtattccaagaattttctttcaccaagggcgatttaatatgggtcattcatactgaaagaaaaacaaaagataataagagtttaaaaattgcaaaacttggagtgttagtagtaaaggtaaatattcattagagatgagaagaggagcaaggaaatgctttcagctggaaatctcagacaagaggccaggctttaggaacctctgaagatgaacaaatgtaagcaaaccctagtagcagcacttctcagattttcatgtgcttaccactcagagatggtgttaaaatgcagactctgattcagtaggtctgagtggagcctgagattctgcacccctaacaagctctttagtgatgcttatgccactggcgcacagaccccacttggagaaatttttgtggtgcatacggtctttgtctccagatctaatgagtctgaaggacagtgtagattgattttttaaatttatgtttattttaatttaatttaatttaatttatttatttatttatttttgagatggagtctcactctgttgcccagtccggagtgcagtggcacggaggcagctcatgcaaccacggcctcctgggttcaagcgattcttccgcctcaacttcctgagtagctgggaatacaggcacgtgccagcacacccagctaatttttgtatttttagtagagatggggtttcaccacattggccaagctaatctcaaactcctgacctcatgatccacctgccacggcctccgaaagtgctgggattacaggcgtgagccaccgagcccagctgtagattgattttgagcagtggaaagtcaaggaattagaaggcatgcttaaatggaaagtgaaattggagaaaatttaaactcatgaaatagtggtggttataaactcgtgataaattatatcctgggatataatttaatgagatggtaacacatttagtttaaagaaataagtgacactttttttgtgtgacacaactgtcttattcttggaaaggacaaggagagaatgaaatatggtatgtcttcacagcacctttcaaagggagaaccagattctgaggagctggtctcatgatgaactgtcagggtaaaccacagttcagcagctgcaaatgtgcttgccaaaatagagacaaaaaaatgtttctgaaaacaaaatttcacatatgccctcctctgaggttggcatcatatcttcctgtgtatcttgggtgtagcttctatcctgccagaatttagacagtagaaaccaaatgaggtgataaacagagtcattttgcagaagagtcaaaataacccagcaagaaatgaaaccacaaatgcccaaggagtcattcattcaccattcaaaagctaatagaaatgaacacaaactactatgaaaattcacccaagaacttaaaaaaaaaaaaaaaggctcatggtgtttagtgtgatagtattcattttacctttgacttgttctaaaaacacaccatacttctaccccacccttcctcagtgccgtcacacaatggtttcagtgtgaaaaaaaaaaccacgttactggaaaaggagggtgcctgggacttgccactctaagctggtagtcaagggtcttgagttctaaaagcatacgcgttaagagcatgattcctggatccaaatgagtatggatctcagcattgccatttattgtgacctcaggctattttatttctctgtgcctgtttctttatcagtaatgaagatgttcatagacccttctcccacagacttaaaggcatatttcatgatttaagacatgtaaaccattcataacagtatacaacatggaattaatatttgataaaggtttatgattattgtaactaactctgtcacttgctcaaggcctatagaaaacttacttaattagttcaactacaaaaagagtttgaatgtgatatccaccaagatcatattcagacctagaattctgtgattcttatgaattaatacagccttggtcaataaatgagagctgggcaaataattcttctttgctaggcctttctagaccatctggtgaagcattcaagacttatgttattggggccagccttcctttccaacttcaactccacaactcctcaataagccatgggctcaagaaagttctgctcagtggcccctgaaaaatgctttcatagtctcactaccataccactgcttacacaatttccttcctacagactgccttcctttcctgcttttctccatatacctaaatcctatctattcttcataagcaaccttctttataacattttctataaccaccaagccaaatgaccttttccttcttaaatatagcacccattggccattaccatgctctgccttgtatttttctgatttttttctttctatattcctgtcttaactccccagctaggtaataattttcctgaaatcagggaccaggctgactcctcttgctgtctcaagaaagcttagcagtttccaacacaaaaatgttcaataaacaactattaattgactgattataaaaaatcagtgaaccattaaacttaatatagcaatttgcttagcatggtaattagctttttgctaatattcttccagccagtctctcctcctgtgcctcaaggacatcttaaaaaaaaaaaatctagttgatctgcttccatctagtggcaattaaaacaggtggttccggtagccagaaaacagctctgggtagattgtgccagaaaatactttcactcagtaggtgcgagtttgaaagaaatcttcacatctgtgggtttcctgccacagacatagggagaccagcccagagaaagaagcctttcctcactagactccatttgcactagtaaagagaagacagagtaattaaaaagaataaaaagaacctccactgatcgtacatcctcatccagttacccctgccccacttctccttcacagccaaacattttaaaagagatgactgcttgttctgtctctactttctcatcctcagtaatgctcaatgcttggccgtctgacctctgtcttgatgtctgcactgcaaatagtctccccactgacacccttgttgcatccaggggatacttactggttctcttggcaatgtttgaaaccgttcccctttctttgtttccttggcattcattaccccacactctttctcctcttccttctccctgcctggcaacatcttttcatttctctttcccttaggtgacttattagataatgatgttcctctggctcccatactctctcccaggtcctcttccattcttaaagcactcacaccctccctggatgatagtacccactcctgagatggcagttacctcctgaaatgtgagggacccaaatccacttctcctgccatagcctctgtgctttggataggtccaatgagccacagtgaatgatgtgcatacacccaaagctcagtacaaaactgaacccatgatctttacctccaaaacctctcattcttttatgttcccttctcagaagtaaacaggactaccatccgccagtttccaggtgagaaagatgataatttgattcttctctctcacttttagccaattaacagacacattcagttaatatcacctcctcttatttcatgaacccattcttactactagttccctagacaggcgccatcggttttaatctaataactgcaaatgcctccaaaacaagtctctttgaatccaggctcacctgtctcccacacttgccatactgctctgcagggtgaccttataagatgccagaggtaaggctactcactgtttaaacccctttagtgatatcccaaaagacctcaagataaagcccatatcacatggcttatacattagtttatgatctggcttctggtgcctcatttttccccactttttcctttgcattctaagcaatggcccatactaagtttgtgattggtaggatggttgcccaaaccagcatccaatcccttcagaaatcatctcacttcatttctagcattttaaaggaagctcagttgtccagctgggtactgaatatgtcaccaaagtcctcctttcatagtttattttacttaaactctccttcctaaaattccagagcaagtcactaaaccctagatactgagaaatatttttccatcttcatttctgccaggtgggccatcaactttcacatgtctgcatctcctcccactgtgctatttctccagtagaagaaatttgagcttcaagaccaaactgaaaaatacttgcctccttggggaagctgtaggtagaattcatgctccctatctttcccacatttctgaaggacaatgcctgttagagcaattgaatgcaaatagtcaattgaataagcatttattcatttctcaataagtgcttgttcaattgaatatttcttaaataatatatttaagaacaagaagaacacaccacaatgtttttaaccctcagaaaaaattctgaggtaatcagaaaaatctccctttacataaactgcccttttctaatagggattacttgttcgttcattcattcattcagctccactagcaccaaaaagcacagctctgaaaggaagctagtagatttatcaccttatctggtcatttggatgaggaccccaggtaaataaactactatggggttaatgtgtctagctagagcaggaagtaacttaaggaagtagagaatgaatcagcagatgtggaaactcctcgccactaataaaacttaccttctcttggatttcttgcctgaaaatagaaaatagagaaaaggcattagcaaaaattagacaatttaaagtttttcaagtaagggagaaggaagactcccactctcaaaactgtcttttgaagtatattaggtatttgttaggtggaccctatctgtgtcaaaggagatttgaggaactggcttaataaacagtggtagacactaatacagaacagacatgttgatgcagatgcctcctgaggttccattccattctccgtgctactcaagaagacagaattgctaaattgcctggtggcaagacccaatatgtccattcaagtgtttatcccttcccaatctgccatctcatcctacctgcagattcttcccttgagggacagctgctaatactgtaaaactatgtgccattacagctcacagcatcatctctatgagaatccacaagagaatttcactttggtcttgttggtaggaattgtgcagcctcatctgagtaactaatgtgtttttatcttacaaacacaaggaatatcacatggttctcctttgactggctgtaaggaaactcagagctagatctgagaccctctcctaccaagtatataaaactttgtgacatacatttttgtgccataacttcaaccttggttccaaatgatttttgtaccctaagtttaaatttggctttcttttttttttttttgtactcaataaaacatcaagctcatttattattgcgaagagcgaaacaacaaagcttccacagcgtggaaggggacccgagtgggttgcccaaattggcttctttttcttactttttaattaattttaatttgctatactgaacacattttgtactgttctcacattctttttgaaaaaagcagaatataaataagtagataacttaaaaaaaactctttgagcagaaagaatcatttgggaggcaatatatttcagtggctgtaaagtggcattctagaatcatcctacccaggtgaaagccctattttgccacctgtagtgtagtgtgtatttgaacagctactttcttttctaaactacaatttcttcatctgttaaagaggcataataattgtatcatcctcattgggttgataaaataaaatatttccaagtatttagttcaggtcctagcacgtagacagtgttgcattactgttttaatcctttaaagtattaaagactactatttgaaatcttttcttctaaaattcagcctgctgatgaccaagtgcacttgagcagggggaatcaaatctgaattaatttcagattctggttagcttcacataaatattttttttagggatgatgaacctaacagcaatagatgagtaagaatctgttcctactgagagagtttcattttgaagaaaaaggaactaagggggcatgtgttcagtttcatgccctggtctaaccctgtgtgttggttctggtgggaaattcttccaaccgaggaaaaaaccagttcacaaatctgaagaccagtgattttagaagatgtatctggactggagtctaatctctgactctgggtcctgctgatatggtatttttgagatttggcctaaaacatcattgccctggtttccttatttaccaaacagggccaatggtagtgactaatcagaaaatgataatgcctggtgcacaaaatgtgtctagatgagcccatgcacaaggacacatgtttctggaactgttccttattcctttcctaaaagaaaggagggaaagtctccatactaagactactagggcaggggacaaagtgctagagtcagaagattcatctgaggacagaagaataggggtgaaggctctagtcacttcattggctaccatgctctaaatagttacctgtgccctttttctaactattagaacccaaaaagcctataaattctctctctctctctctctctctctgtgtatatatatacatatacacacacacatagacacacacacacacctaaacacacacatagagatttatgactttttacttttatccttgtaaatgccattaactatattttgtcttagatttagcctgggaatgtagccattatttctaccattgcctccataggaaaaatactcttcatgttttaaaggaccaacctacaactaaaatctttggaaagcagaatcatttgtaagttggtgaaaatggaagatgttgttttataaatgaagactttttttttttttttttttgagacagggcctcactctgttgtggagtgcagtggtgctgtcatggcttactgcagccttgacctcctgggttcaagtgatcctcccacctcagtctcctgggtagctgggactacatgtgcatgctaccatgcctgactaattttttgtatttttgtagagatgtggtttcgccatgttgcccaggctggtcttgaactcgtgggctcaagtaatcctcctgcctcagcctccaaaagtgctgggattagaggtgacagccaaggtgcctggcccacagatgaagactatttaatgttatcttaaagataccctaagcttcctaccaagccagtgatcttttggggcttctgttttctttgttggcataactgtaactagcctaactgcccgttatctgtttcctgtttgccccacactgattcccacagcagttttcaagttatcggtttgagatcttgtacagaaatgactccaaggtaaaaaatttaaaaacaacccctctaatttttttacccttgcttataaaacagccttagccagctaacccctcactacatgcaaatgagtttgattctattcttttgattctacaaacacttattaaaagattttagaattcggaaataaatagcttccttattaaggtgacttacagccccaaagtccttaaaattatttagacaatagccaccttatcccagggggcagtgtgtaataacccaccctgttctctatccgtcagttctgccatcatcgcccaaggtaggaagaaagacaggacaaccggggtcaagatttgaagtctcaatggaaagaataatcagtggttggagaaaactgtcattcttcttttgccttaatgcagtacttgatacttatacttagtactgtatagtacttagtactgtataatactataagatagtgagattcaatcagcacagaatttctaatagcaagggcagagacattttaactgctcagtgctctcaggttatacatagctaatgaagttcttgcatatcaacaatccccacccccctcacacactttgtctttctggattggttagaaaacttacctagcgcccactattctcaaatttaaatgaaagataagatcagagtggcacgcaattagggactgataaataatatttttgtaattgccagtgtaaatggacagggggcaacctttacataccatattcagtgaacagaatacgtactaactaatttgatggaaggaaaattaaaatgacaatcaactgagcccacagaaaggcaacacagagcagttggttagcaattgtttcgagatcatccctgaacttgaaacaggtatatcttttttttttttttttttgagacagagtctcactctgtcaccaggctggagtgcaatggtgcggtctcagctcactgcaacctccgcctcccgggttcaagtgattcttctgtctcagcctcccgagtagctgggattacaggtgcccgccaccacgcctggctaatttttgtatttttagtagagacagggtttcaccatgttggccaggctggtcttgaactgctgagctcatgatccgcccgcctcggcctcccaaagtgctgggattacaggcatgagccaccacacctggccaaaacaggtatatcttaaaagctgcccaatgtccatgaatgttacagccttgaatggttcttccaggtgagtttggccaaatgtggcaccatacacccaaggcctgctgcaggctagtgggttgctcacactttaaagctgagacacactcatgccttaaggtaaagggagtgataatctgggcagcagatgttaacttctcaaggcagtcctccttctcttttcctctccagtgacggatggttggaaagcatatatggtgcatttggttagagctgtggccttggtgaatagatacttgggagaatacatgggaatttctcccagggttaatgcaatgcccatgtgttgggaaccaggtgactcttgaagaggtcaggtatttgggagcagtgccttgaaaccttagtggacattagacccacttcctagtggaattgtagcattgaaatccaaggcatgtaggctcttagaggacagagatagtgtgtcattttttcagaattaattaagagcaggccaggcgtggtggctcacacctgtaatccaagccctttgggaggccaaggcaggcagatcacgaggtcaggagatcgagaccactctggctaacacagtgaaaccccgtgtctactaaaaatacaaaaaattagctgggcatggtggcacgctcctgtagtcccagctacttgggaggctgaggtgggagaatagcttgaacccagaaggcggaggttgcagtgagctgaaattgcaccactgcactctagcctggtgacagagtgaggctctgtctcaaaaaaaaaaaagtattaaagaattacataagagcaaagaaccattagaatatctcacttagttgttatcagcctagcaagctgccttgaaggtaatagacatttttaaaagtttatcagatgaaaagcgaaaatcagccaacctgttttaatgaaggtgtgtcctgggctgatttacatgtctccagggactgatggctctagaatgtaaagcttggcatcctgcttgtgttgaatctatcacatttaatttcctgtgggtttcttttttttttctttttcactttaaagttgtgttcttttcatgtgaagttaaactcacatacctttttttaatctccttgccagccaaatgataaatgccaacccagagaatgcagtaaccatgactgccactggaatgaagagggggttataatcaccctccttaatcattgagaaacttttgtccaattctgaaagagaaatcagtaaggcacatagcatgagaccaccagcattatttccttagtctatctcatgatatttgacttttttcctccttacatctcccagtagtagcccatttgatgccatttgacagatgaggaaactggcatgggaaggcccctgatgagtctacagcataggcaaagactggaccagccttgctagtctaatgcctacagaatctcaatgcccagatttgtggttcatagagttcctgaaaatgcacctaaaaatgttggcaagaatggtcatcgttgtatttagctccatggacttgttcaatgactggaactctgaaacacagagaagagctaaaagcctaatacaacttcaggaaaaataaaagccaatgatctgaactggataattcaccagtcaaaggaaatcattaatgcttttactttaaagcagttgtgcaaaaataagcacttgatttttacatgccaaggacctgcactaatttctttccaatgcagtagttaccacttccctctacttccttcacgaataagtaaaagggcatgtttagagatactcttgtaagtgtaaactaagttcatttgggagcctctatttgaaaatactggtataaaaaaaaatctgtctcctgatactaacatttgaaggaatctacttttttacatattggcagagggtctgattctatccttagttcttcccattactttgatgaaccttttcaaggtgatttgatccccacacccaaatatatgattgagagaaggctcaagttcccaggagctccagacagaaggtacctgttggcttgatgaagatgaggaggaaatgaacactagctaggccttaaagggaaatgtctctgataggcctaatacacagtcctctgctaaaggcctccctgcctctctctgctcatccactctactccctggccctgggcacgcagcacacagagatcagcatttctgacagcttctgtagatcctaccatttaaagacttttgtcatccatgcagatagtctcaggagcagacacaggtagctattctttcacatgctagcttaacatgcatttgctttagcacctattgccaggcactgtgtcaggtggagggtatacaaagatgaacaagacatgattcttctcatatacagatagattttggaggcattagcttagtgatgattcaggagtatccattatttggggaagtaggtggtcattagtgaccttttacaggcatttcaatgggctaacagagatgttagattgtagtggaatagaagaatgggtaaaaagtaaatcagtgagttcagattttaggagttaagatggcaagaggtgagaacaaaaaaaggaaatgattgtcattaaaggaggaggaaagaccagccaaagattttacagtgagttaagcatacaaatttatttctaggccacatattcttagcaaaacaacatgtaaatgtttatgtatgtctttcctcatatctgctcatccatcagctccatcgttaagatttcagttttccaggacaaacttactcactttgacatattggactaggatttgaccagattccagatgattcacaaatggttttcttcttcccaattaactcagttccttctgagcagatgaaggtacatgcagaggtaaagctgaagctggccaggggatggctacagttcatgatccccaaatctggtgctgatagaggctcacactgaatcacttcaatgaaaaagaaaaaaaaaaaaaagacaaaacagtatttctgagtagagaccctcccttgagcaaaggatttttagccaaagctgcctgactacattacttgtgatattgcttccaggctttattttcttgagaatgatggtgggtggtgaatgagagatgaaggcaaggaagcattgaaagctgtggggagaggagtagctactccaggctgctgccctagctaaggtgaccctccccttctgctggaagtaccatgccatatggcctctgcatcaagggctcttatgggatattctcagagaatctctgccgtttcatctgttctgatatctacccaagcattttgaaaaacatcccaattcactgaagcaagtccaacttccgtaaattccagtaggtgggttgacagttttataatttcaataagggattttgatagcacttctaagaattaaactacttaaactaatgcatcaggagcatacttgtagaaaagttaaccaaaacttcgtaagttcagatgacattggttttctcccatatggagataaggttggcagttaaaaatgaaaaaaaaaaaaaaacctaccttatttcaaacttgaaaagatcaagagattgtgtttttgtttttcagttgttattctcctaaaagtttatgcatgaggaaaagtaaaagtgattttaagaataagccaaataaaacaaccaagaaagacctccactaccctgggaaggaaactggttggtattaagtaggacaccacataaaacaggtgttattgagaggagaagaaccaaaatgtaactgaggttcaacaagacattatttatgcaatggcaatgagaaaaataaaaaacacagtataaccatgctgtattgctataagtcatgttacacactgggagatggcttcaggggtatttggtttttactttttgtttgggaggtttttcaaaaaaatttagttagaataagtcctttgagaaacatcacagtaggttaaacaaagttaggttaaattaggctcctaagtttgacttctcagcaaacttctactgaatgttctgactgtaagcccaggattgcatgacaaaacctctagtctgaagttactcaccttgacaggttggttctggagatgaccagtttccaaatggtccacaggtggtttcttcaatcccagttaagtttgttccttcagagcagctgaaggcacactgtgagctgaagctgaagtttcccaaagggtgagtacagtccatggtacccagctctggggcctccaaaggctcacactgaatcacttcaatagggaaagaaacagtatggggaagagttaagaggaactgacgcctggatttgaatcctagccctgccacttgataaccatgtgcctttaaacaaggttacttgaaccctccaacttcagtttcttcatctatataagaggaataatgaaattgtgttatctttatcaaattgatatggaaactaaatgtaattcaattagcataagtcaaggaccttagaacaaagcctgactcatcagaaattctaagtaaacattagctagtcttcatattattatcttcagcattatctgtagtgagaatccttaaagccaaataggtgtaactgggaatgaccagcttagtcgggaaataactatcacatcagagcccctgagtctactagagtattgggagcaagatgttcagagaaagagtgggtctccataataagccttctttgcaaggagagaatataaaagtctaggaagcattttgacctcaattctgtcttctattctagctcagttccagaattttaactcttttgattttgacaaccctctccagaaactgtatctatttccctgttctgattggtggtacaataggtaaatttaagacttggaaatcaaagttttcacattttagaccctgccatgccatttagtaaacagtacaactttcatgtcttattcctcatctgtcaaatttaagccattattgctaccttgctctagagacttcaaggaagaatggactcaaggaatcagaagaatttttgtatttggaaactatatgagatgagattagggagaaacatgggaactaagagaaaatgttatcttttttcattgatttaaagagtatctattatatatcaagcattactctggggcttgaagagcttagatttcaccctgtaggacaaaatggtaggtagaaattaatgggtggattgtcatgtatgtgtgatgtgttttaattgcttttaattgatcagtctccctgtagtatgaataatgtatttgaggggagctaatttaaaattgtggaactcatctaataaactattgcaagaatctagaagaaagataatgacggcaatggtagtagagttgacaagtggaagacaaattagaaaaacactaagttgtaaaaattggtagaatgttaccctgcataaatgttgggggagttaagagagtctcataccagggtgcccatgtaaatggtgattccacatactgagataagaaatacgaagagaaaagctgactgggaacaattggttttatagtcttttaaacatcccaaaggacatccttagcatatttgagttcagagctggagataggcttatcagtccaaagatcacatagatttgtgagtccgcaaaagtcagtaagtttgaccaaaggatacatgtagattagagtcagaagagcaatatacaaaagacaaaagctgagaaattatagtagtttatggtcctggataagtgctcatgaaggatctcaggagaaatgatcacaggtagaaagaatgagaaaagagtgatatgagagaaaccaagacaaagaaaagtaaaatgttaaaaatgagtgaaataggcataccaataattaaaaatgagtaaaataggcataccaataacataagggttaaaaaatagagttcaaaaatggggtgagggtaaagtattaggaaggagtcatggcccagggatcaagtgaaatgagttagatctatagatctatttcagttggttgacatttaaatgtattttggttttaattctttattgtttacaaacattgcttttttaaaaaattaaattgtccaattcaattcaggctcacaagcaagtgcctcatatatacaggcattttgtggatcccaaagatgcaatgataaataggacacttactgatctcaagaagttttcagtaccagaggagacggacaagtgaacagatgacttcaacataagtgggagaaatgaggaagaaatatgtggagctatcagaactaagaaagcttcctagaagaaactgtctttgaacaatgtcttaaagatgacatgttttttggccatgtgcaaaatgagagagaaggccaccagcaaagtcagtgtgctacagagcacatgtgttaagtgtggagaactgcaagaaggaaaggaactactagaaggaaaaagcaagatactttctgggtaactcagcctcctaatgataaatggcatagtttcttccagaccttagagttctaattaatctaacaagctcattagatcgtgagcttcttgagagcgggaatctaccatgctaattccttatggtaaccctgacagcttttatcccaacactgtgcttcttgtggtactcaaaaagacttgttgagaagtgagtcgaaacttcatgctgacttatgaaatctttacggaaaggtaacaatattgtgaaagcagagctttctgatcaaaacttcccatttctcagagtggctagtatcattttgttccaaccagcttcatgataagctataatgattcctgtgactttacctaagaagaagcaaagaaaggaaagagacttaccaaactgacactggggcccatagtaccccacatcacagttgcaggtgtaattattgatgatttctacacattctccatggccactgcatgaccagggctggcaagaagctttaaggaggtcagaaaaaaaatattttaatgtgattacattttagtactcaaagtcatttctttagacatagataaccttttgtctgagatgatttaaataatcaggaaaggtttatttgtaaattcatagcataaaaatcatatgctaaaatttttacgtataaaatacactaagcatatagtcataggcatttatttgcttttggaatgaaattaccaatactaatattctgtaacacttataggaaacttagtggcataccttgaaactcttgaaattacttgtttttaatgagtgagaaggttaaatgatgacctgacctcaatcatttctgcatgcaattatttcttggcaatccctttctttatagaaatcaaagattaaaaagtccaaatttgctaaaacggtagagtccaatttataagagaccaaattaactatggttcattattaaaacatcacttggaaaatgctggctgttttggaattgtagaagattttacagaaatattcatacaccaaagatagtgcaatttttatataaaattatataaggttagaccaagaaggaagcacgcagcaccacactctctacttcacaatgtgaaaactgaggtgatgtgagcctaagtttccaactggccccagctgtcagcttctcctcccctgccttattatcaaaggcactgattgtctagctcttcctctgtacttcctacgtagatctatcattttgatgtaacttgatttaggggtatagcttttgtgcacagggacaaatcttacacaccaaaaattcttaggagtgacacgatgcaagattatatagagggctagatgtattttagaatgaaccagaagctgttctcatccccccacctttccatggggtaaatctgagtattctcttaaccgtggcccttcctgagtctgaggcagcatagccgtcttgtcactccctacctgtgtaacagagggctgcctttagtttgtggcaggcgtcatcgttccatttgcctgcatctttgtttctcttgatatagatctccacgcagtcctccttgttcttcttgttgttgggctcaccatctccccagttctctgcttcttcagtaagagatttgttggttcccacccacgtccatattcctcctatcttccggattcctatccagtagtaagaacgactgaaaggcagagtcttctccagatactcaatttccgccttgttttgtatggcaactaaatctgtgtaattgtctcggcagaatcttctagccctttgccagttcatgggtttttcagaataatggtaagtccagcagtcggttccatgatgtgccaggaaatctgcaagacatcagtgtgacctatgcagacttacataatgttacagctaaaaagaacctagcactactccaggctgagctagacacttagagatgaggaaacagagcctaagagtgtatgtgaccatctcaggatcacagaatagttgtttgcagatttgaagtagaacctagaccttctggcttgaatataagatgcttttatctaaggttctatttgaaacaaatttagtggttttctaggtttattttcttattaatttttttctcaaaattatttcaggtgaaatttaaccaacatattttagacattcatatttctttttctttgtagctgttaatgatttacaactaattaccgtgtaatatcatataactatacaatttacgtatactttttaatcctggaatcatttcttgaaggccaacacatatgtacctatgggagaagcataataaggacaggaagaacagtgacatacttttaagtaacctcttttacataaaaaacattttattttaccataggaagaactgcttctggaaaagcccaatataccactcaactcttatatatctaactgtataatttttaaaaagaacaatttacaaagccaaatggtataggattatgaaattcattagatcatgttctatacacaaagagactcaactgatgatgtttaataaacatatggacccatcaaatatgagggctttgaagatatctaattaaacacataattacacaatgacttcataataatatatggcattctaagcatggtatgatctacatgaatcactatttaatacagtaaagaaacagatataattgatggtaaagagcatcataaaataaacattttgaacagagttttgaatgagcattccactagaatgcaagttctaagagggaaaaaactgttgtgtccactgctgtatccttagtgcctagcataaatttcacacattgtagggactcagaaaatacctgttgtatgaaaagagcactaagtttctatgtgacacagtgcagacatggcataaggaatgtgtgaacgggagagttagcatgtttgcttggctagagctgaaaatccaggctagggagaaagaagacattagtttacttaggaaatgaaaaaccaagttcaaagctattgctggagagtcttcaagaatcagatataaaatttgtcacaacaatgggagaaggaccaaaaaatgataaacccccgtcccttaataagctcgtattgtaattgtagaaatgacattaatgtacactgaactatgaataaaaaatagaaaatgaggtgctaaatatttggtacagattgtaagtaccttaacagagatttcttaattaacattattcctttataattgagggattttgtggggttattgggatttgaactctacagcatgggctattataggttaaaaatagtgttcaggagtttctggggaagaactaaaggtaagaagaaaagagatgtttacagaagggatagaattaacagctctgtgaaataattttcccttagactatgtataactagtggatatttaagaaaaatgaatataagtaaaatagacttagcgatatataaatatcataacataccacaacagagcattgtccacccccacaacttgaagatgttccataagtccctctgggtgctctgacatttccatggaaatatctgcaaatgaaatacaaaattatatttagatgtatactcttaaaccacacatttatagcctttgaggtggtgcttacaactttcttaataatcagaataaaacacatatgtctactaaccctgtctgaggtaacaggtttctcagacatagatgaaaaattacttcaaatttacatcagaactgatgcacagttttgttttgttctattttatttttacgctttagtctcaagttgctaatcggtactgccctgaattttttctatggtttggtaatttttatacctgcttttctgctgagctattagataaaactatttaatatttactatgtatattttttaaagtattgttgctgcttaattaactattgatgcttatatttaatgttatagcctcactcttgatcataatgggtcaatgcctcaaatacctaaaaaaaaaaaaaattagatagccagacaccaggaaagaaaagtatttctttttttaataaaaagaaatacctttttgagcaactgaaatgacaaagtcacaaatttcctgcacaccttaaaatatacttaatgtaaatgacgagttaatgggtgcagcacaccaacatggcacatgtatacatgtgtgacaaacctgtatgttgtgcacatgtaccctagaacttaaagtataattttaaaaaaattctatcttccaaagcatatcacttctcaggtagacacagtgtttattgcaaaagatctgatttcaatagtatttcttcaagagtctccccagagacaaagtcaagaagaggaaatcagcatatctgagaagaaagatttcaggatcactttttttgagggtctgagaaaatgtttagtttctatattatttaaaaccagaattgaaatggggtgattcctatccttgccacctgcctctacaaccccaagagtttctatctgagcatctaaacgtcttttaggctgaaaggctcaccatggctttgcttggtccttctctagttcttctgcagcccattgagcctcttgacttagcacaagggtctcaggtccttgcccaaagggagtgtgctgtgctgcaggtagactgcactgaatgtcaacagaaagccttgctttctttcatttctctaacccagtctcacatcctcctcctcctccccttttccctccccttcctcctgcacttctctttcctctttccccacccctttcctagactggcctctattgcctcccactgagacaaaaatgaactgctgatcagaaagtaatgtgactagattctctcttccttccctcctttctatccttccttccattctcctatgcatctttccttaccctcctcctccttcactcattgttgttgctgttcttcttcctcttctttttcctcctgctcctcttcttctacttgttcttgttcttgtttttgtttggttcttgttctcctcttcctccttctctctctcctcctcctccttcttttccaccaccctcccctatctttttcataaatgctaaactaactcttggctacctgtggtaaatggcccttggaaattgcaaatactacaaatcaaaactgcatttcagacatatttatgatgtttgcaaaacttcagtagagctaagcagtggacttgactcgtttcggttccttcacctccgtctttccttgctcaccacctagtggacgtccttgttagtggcacttcctgaagttaacccctgaagagagcccatgctctctagcttttcaccgtgtaggtttgggagcctacaagtacctttaatattcttggactataaaatgagatggttttataagactgcatgtgaaattaggacccatatgatgaaggacaataaaaaggaagacccactgatgtgagtcaatgagtcaaatgcaaatcagatttgcatttttaggaaaataataataacaacaacaaaaactctgaagctcagcgccccatatttattatattgtttaatctttataacagctctctgctatagatatgattattatccccattctaaagagtctcaaagaggttaagaaacaaattcaaaaactagcgaaagacaagaaataactaagatcagagcagaaccataggaggtagagacacgaaaaagccttcaaaaaatcaataaatccaggagctgcattttgaaaagattaacaaaatagatggaccactagctagactaataagaaagaagaatcaatagacacaataaaaaatggtaaaggggatattaccactgatcccgtagaaatacaaactaccatcagagattactataaacatctttacacaaataaactagaaaatctagaagaaatggataaattcctggacacatacaccctcccaagactaaaccaggaagaagtcaaatccctgaatagactaataacaagttctgaaattaaggcagcaattaatagcctaccaactaaaaaaagcccaggaccagatggattcacagccaaattctaccagaggtacaaagaggtgctggtaccattccttctgaaactattccagagaatagaaaaagaggaactcctccctcactcattttatgaggccagcatcatcctgatactaaaacctggcagagacacaacaaaaaaagaaaatttcaggccaatatccctgatgaacatcattgcgaaaatactcaataaaatacggcaaactgaatccagcagcacatcaaaaagcttatcaaccacaatcaagttggcttcatccctggaatgcaaggctggttcaacatacacaaatcaataaacagaatccattacgtaaacagaaccaatcacaaaaaccacgtgattatctcaatagatgcagaaaaggccttggataaaattcaacaccccttcatgctaaaaactctcaataaactaggtattgatggaacgtatctcaaaataataagagctatttatgacaaacccacagccaatagcatactgaatgggcaaaaactgaaagcgttccctttaaaaactggcacaagacaagtatgcctctctcaccactcctgttcaacatagtattggaagttctggccagggcaatcaggcaagagaaagaaataaagtgtattcaaatagaagagaggaagtcaaattgtgtctgtttgcagatgacatgattgtatatttagaaaatcccattgtctcagcccaaaatctccttaaactgatcagcaacttcagcaaagtctcaggttacaaaatcaatgtgaaaaaatcacaagaattcctatacagcaataatagacaaacagagagccaaatcatgagtgaactcccattcacgattgctacaaagagaataaaatacctaggaatccaacttacaaggaatgtgaaggacctattcaaggagaactacaaaccactgctcaaggaaataagagaggacacaaatgaatggaaaaacattccatgctcatgggtaggaagaatcaatatcatgaaaatgaccatactgcccaaggtaatttatagattcagtgctatccccatcaagctactactgacttttttcacagaattagaaaaaaactactttaaatttcatatggaaccaaaaaagagcttgtatagccaagacaatcctaagcaaaaagaacaaagctggaggcatcatgctacctgacttcaaactatactacaaggctatagtaaccaaaacagcatggtgctggtacaaaaacagatatatggaccaacggaacagaacagaggcatcagaaataacaccacacatctacaaccatctgatctttgacaaagctgacaaaaagaagcaattgggaaaggattccccatttaataaatgatgttgggaaaactggctagccatatgcagaaaactgaaactggatcccttccttacaccttatataaaaattaactcaagatggattaaagacttaaatggaagacctaaaaccataaaaattctaggagaaaacctaggcaataccattcaggacgtaggtatgggcaaagacttcatgactaaaacaccaaaagcaacagcaacaaaagccaaaattgacaaatgggatctaattaaactaaagagcttctgcacagtagaaaaaaaaaaactatcatcaaagtgaacaggaaacctacagaatgggagaaaatttttgcaatctattcacctgacaaagggctaatatccaaaatctacaagaaacttaaacaaatttacaagaaaaaacaaacaacaccatcaaaaagtgagtgaaggatatgaacagatgcttctcaaaagaagaagtttatgcagtcaacaaacatatgaaaaaaagctcatcatcactggtcattagagaaatgcaaatcaaaaccacaatgagatgccatctcatgccagttagaatggcgattattaaaaagtcaggaaacaacagatgctggagaggatgtggagaaataagaatgctttttacagtgttggtggaagtgtaaattagttcaatcattgtggaagacaatgtggcgatttctcaaggatctataactagaaaaaccatttgacccagcaatcccattactgggtatatacccaaaggattataaatcattctacgataaagacacatgcacacttatgtttattgaggcactattcacaacagcaaagagttggaaccaacccaaatgcccaccaatgataaactggataaagatgatgtggcacatatacatcatggaatactatacagccataaaaaaggatgagttcatgtcctttgcagggacatggatgaagctggaaaccgtcattctcagcaaactaacactggaacagaaaaccaaacattacccattctcactcataagtgggagttgaacaatgagaacacatggacacagggaggggaacatcacacactggggcatgtcaggggatgtggggctaggggaggaacagcattaggagaaatacctaatgtagatgacaggttgatgaatgcagcaaaccaccatggcacatgtatacctatgtaacaaacctgcacgttctgctcatgtatcccagaaattaaagtataatttaaaaaaagtttaaaaaaagaaagttgccttagtcacataactagtaagagacatggttgggaatttgaacagaggccaatcagttccaaatccatgctcttgatcattaagctgaacttatggcaggaacttggaagacatggtaaaatggggaaaaacgtggagccagggagacttgtgaaagtgccagtgctcccactataccctgaaagaagtatctagacttacttttttctaagtcctctcctctaattctctcaatctctctctctctttctctaagagatgggaatgctgctctgtcactcaggctagagtgcagtggtgcgatcatagctcattgcactcaaggaatcctagggtctagtgccccttctccctcagcctcccatgtagctaagactacaggcacatgccccaaccctcgactaatttttttattttttatttttgtagagacaggatctcactatgttgctcaggctgtaattctgtcttgaagcttgtccaatcaggctttcagccacaccaattccctgagactgctctcaccaaggtcctacacttcactaacacaaacagcctattctccatcctcatcttacttcaccagggagctcctggttttcctcctacttcactggctatttcttctgtatcatgtgttgattctccctcatctccccaacctccaaacccttggagtactccagagatcaccgctttgctcttctgtgtctaacctcactaacttggtggtccaattcacactcttgactttgaataccatttaaatgcgaacgaattctaaattctgtacaaccagaaccattctcctgtagccaaatgcctactcaacatctccatccccaaacaaatttagttgttcaataagcctctcatattttacatatcccaaactgaacttctgaatttctcctccaatctgtagggctcttcccacagcctttccatctcagtggattataactccatccttccagttactcagaccaaaacttttggagttaactgagacacctctcttttttttcacaagtcatatccaatgtgtcaacaaattttggtagtggaaatattgcgggattttttaagaaatcagagagaccgatggggttcaggaggatatttattatttaggtgcactggccaagtcagattaacatccaaaggactgagccctgaacaaagagttaagttaccttttaagcattttgtggggtgggagagaggggtatctgtgcagggggaagcatactacagaagtgagaaataaagacagttattcaattaattgagacatgcattacatcatttcttacttttcaagaagaaacatgttttgcgacttgagtttatctgtctagtgaccttgcagctgcacagctagagaaacagggtcttcacaatgcctgggaaaggaggagaggtaagtctcactagccacagaaaaacaggcagttaatttttaaagggctccagctctttctctttctcagggggagttgggttttgttacatacaactgagtttccgcttacacattatttaatttcttttaattcctgttccaaaagaagccagatacaaaaggttacatgttgtctgattccatttatatgaaacatatagaagaggtaaatccatagagacagaaagtagattagaggttcccaggggctgaggaagaaatggggactaactgcttatagggtacagagttttcttctgataaaaatattttggaactagatagacattttgttaggccattcttgcattgttataaagaattacctgagacttggtaatttataaagaaaagatgtttaattggcttacacttctgcaagctttacaggaagcatggtgccgatatctgctcagcttctggtaaggcctcaggaagcttacaatcatggcagaaggtgaaaggggagcaggcatatcacatagcaaaagcaggagcaagagagggatgtggggaggtgacagtcacttttaaacagccagatcttgtgagaactcattcactatcatgaagacagtaccaagaggatggtactaaatcattcatgagaaaccccaccctcatgatcaaatcacctcccaccaggccccacctccaacactggggattacaatttgacatgagatttgagtgagaacacggatccaaaccatatcagagatggtggttatacaatgcgataaacgtcactggattgtacactttaagatggttgttttatgttgtgtgaacttcacctcaataaaaaaaaatatttaatgtacattcagccaaaagaagatttggaataggaaaggtcatggagatatattaacagccatttgatgggtggtaaggaaaagagtggttattagactgttttgtggccctcaaaaggtagaactagatcgagttggtgagcattataaaaccatcacaaaaccctggagagaggacccagtgctgaagaaccgtttgcctgccatgagacatgagggaagtaccagtgaatgccattgaaagcagcatccctgggtccaagggatggtcaaaggaccactacccaacccttccctagcctacgcctccattacagatgaccgcaagatttatttgctcattgctgccaaccaaggctgcactcactgcagttgctatcagtttatcatgggtaaaaggaatgtgcagtagagaactaactaactgcccacctacctccacaatcctatcaggacaaatcaccatggctcacatttccttacatttggcatgtaagcccctcttactgtctgtcatctatctcctacacagttcacctaaactgttctctcctgacccaaccttgattttcatcccaaatgcttccttgccatctctgggattcctgtcttcaccatcaccaaactcccctcaatcttccagtttcctgttcaaacttttctcctacctccttgctttgtcattagcccgactgcctccctaggacatcacttcccctgcagatctctcaagatgacaatatttattctccacacagcacatacttcagggttggaaggcaggggcaatcttctcctttataatgagtgcctcttatatatgtttattcatctgccctcttgtaaaacacacacacacacacacacaaagaagaaataaaataactctgcttctttgaagcttgtgacactgagataaaccatctcactgtcctcattgtagtgacctctcaactcctcatgcaagattggctttggcacctagttcctgatcttcctttccctgtaagcacttctcatagtcttacgggacttcaccatccatggcacaaccaataccacagcccagatcctcagctctccaatgacattttcctccactagacttgagctacctccttccctaggcacagcctcaacctcgacaacacctaagactgtaccgtctctaaagtcacatgttcaaacacttcactctttaaccactgtctcctattcttgcaagtgtattgctcaagtatctcattgcaatgctttttacttctacctcattgaacctccaggccattaaacatttccttatttctaaccatcaggtttctccttacttgtttgtttgtttatttgtttcttttttttttttttttttgagacagggtctcactctgttgcccaggctggagtgcagtggtatgatctcggctcactgcagcctccatctccctggttcaagtgattctcatgtctcagcctcccgagtagctgggactacaggtgcatgccactacgcctggctaagattttgtatttttattagagaaggggttttgccatgttggccaagctggtctcgaactcctaacctcaggtgatccacctgcctcagcctcccaaagtgctgagattataggcatgagccactatgccccacctggtttctccttatttatttcaagtctatgctgcactattaaaactgccttgacaaaaattataatagtgagaaaattatgacagtgaaagagatctgaaataatcaacccccatcttgcctttaccttccagactgcccttaataattcctgagcttgggccaagctatctttggcagaaatttagtttatagtttaaatgataatagcccttctccaaaactaaactgcctttgtaaaactaataaaagaccaccaatgaaaggttaggaggatgagaggagcctgaattctgctaaggtgtagatgtaaacaattaccaactgttattccggaggtcacaagatttgcaacatcgccaattactcctgcagataacagcactatcatagaatctgattggccttttgagatgtcttttcagattcttacatttcaactggtggctctacctggacccatcaacaagtcctgtggctccacccagaagcagacttaacatgcacaaggaccattttccacaccgctatgattgcatcccaaccaatcagcagcaaccattcctctgcctgccaaattatccttgaaaaatcttagccttagaattttgggggaggctgatttcagtaataacaaaaccccggtctcccatttggctggctctgcatgaattaaattctttctctattgcagttcccatcttgataaatcacctttatctgggcagcaaacaaaaggaacccattggacagttacactgttggcagatatatcttgcttccaaaattggatttttgtttaatgaatttattctgttttcttgatatttacaactgtgaatgttgtgtctgaattctctttatttcttgttgaaaagaactatattgctacagccagtacatacagatggatagctaattactcaacacggggggatgtgaccatcaccgcactgtgcaaatgaatgttacccattgtccacttttcccaaactacatagtgttatatggtatatgacccaatcaacggtggcaaagctccagaaataccacatagacatcagggacactttaaactaatcagcctatagtcctttttcagtaatttccaaacctggttgtgcatccaaatcacttggtaacattaaaaaaacaaaaaaatatacacgcaacattcgctcccaatcctactgaatcagaatattttgggttggttcaggaacattcaggagtttttcagggtccaaggtttatataatttgaggtctctctttgagaaaaggaacgtaaaagcgtcttgcttttatagatcttacaaagatgtattaccatgtaaacacattcctaggacccaggcccttgtaatttaaaggtttatctaagtaatgggccctgaagcttaattttcattatcttcagggcaaattacctgtgggttagggtttaggaatatatctctctgtgtatgtgtgtgcacattagcatgtacgcttgtgtggattttttttttttttttttttttttctgagacagagtctcgctctgtcgccaggctggagtgcagtggcgtgatctctgctcactgcaaactccgcctcccaggctcaagcgattcttctgcctcagcctcttgagtagctgggactataggcacgcaccactatgcccagctaatttttgtatttttagtagagttggggtttcgccatgttggccaggatggtcttgatctcttgacctcgtgatccacccgcctccacctcccaaagtgctgggattacaggcgtgagtcaccatgcccagcacttgtgtggatgttttaagctcccaggtgagtgaatacaaaactagatctttcccttctgtagcatctgtactgtttactctatgcatctcaatattttttcttttagtatctttcctttttctctcttattacttcctcttgtgctatttttacacctccttttttaaaaaattttttcccttttatttctattgacctttagccctcacaatgattcctacaagccccatttctgtaaatggggattgaaataattgctggacttttgagagatagatatattaaattgcaaactggcagtagtgggggcagttgatacataactaggttttaaagtctagccttctgagaccactcattccatttgtgaaaagtgattctacttcttattatgagccaaaatatgcattcattcacccatgcattgatttattcattcaataaatatttgttggatgtccactctgtatcaggaatgtgctaggttctgggaatacagcaatgaacaaggtaatttttccctacccctaaggaacttagagtttagtggggaagacagacattaaacaaacaattgtgcaagtaataatctataattatttattacaattaaaggaaggaagagacatatggattatgagggcattaaagaggagacctagtgtaagtagccagttctcgtgaagggacatgtattagttggagttctccagagaaacagaaccaatggtgtgtgtgtgtgtgtgtgcgtgtgtgcgtgtgtgtgttggggtgtgggggtgtggtattttttatagaaattgtctcacacaattatggaagctgagaagtcccatggcctgctgtctacgagctgagaaccaggaaagccagtggaatacttcaaagtccaaaggccctggaaccaagagtgccagtgttggaaggcaggagaagatgggtgtcccagcttaaaaagacagtgaattcactctttttgctctacatagggcctcaatgggttggatcatggccacccacattggtgaaggcaatcctcttagtctaccaattaaatactaatctctttggaaatactctcacagacacactgagaaataatgttttatcagggtgatagaaatcttctggagttaaacaatggtgatagctgtacaatcacatacatttttaaagggtgcgttttatggaaagtgagttttatctaaataaaatttctaagaaagagacttaacacagagataaacataagcacatttattgtcaacctttatagtgttatgtcaaataggtctgacataagcttaaataaatatatactttaaaaattataaaatattttaagttataatttaaaattctcaataaaactcaaacacaaaccacactggtatttcacacagctaatttctaatgcagtttacataaatatttacaacacttaaacaatttcaaagaaaataacactgtattccatacatagcctgatcacagtagttgttctctcttatttcccagagtttttctgcccctttaaaagaacctctgctgttctgatccttatcacatctctgttttgactgttggctttgttgttgccagtgttcagccagaacttctctgaaacttttttttcaacacatgctaagttaatggaagtgtaggagagttttgattctcacactcctcaaggctagagcagctttggcaattactgactgagaatttttcattgccagtgatcaactgaaaactggagattcctttggaattgttaaatctgcttataaataaacataaatgcttgctcacacaggcattcctctcttccagagcaccctaacatacagaagaaaacaaatagggaataactattagacatcttcattcgttaaaaatctaccagatgactcttttacatggtgagtttctattgtgaatttaaaatcttccataatatacaagaattatgtttacatatcatatctgacaaacatctttgtaggaatgcaaagcacatccatctttctgtattcttttccaacaaagacattcataaaattatacctttgtgtgtttgcatttatgcttttattagttcaaaacgtttggcctcatggaagtttttcatcgtggaaaccacatatttctgaaaaaatatctgacaatatacaaaccttccattcagtttttactctccaattctaccatgttttcaaaaaacaactgtagtaaaaacactcagaactttattctggttaacatcatgccttgctaggggacaatagtttccctttttgaaataaatttaaaacagatgtaacataatttgttaataaacaatgagggggtaatctagaataagtaacttttaccatatcatagttgacagcatttacaagttttttaagtccctaccacacttgtattgaatgaagaagtatggaagattataatatattcaatgcaagtaaaaatatcacaatccttaagaactctttaagaagcactgaatcccatagggatgaaagtgattaaattgtgcatagtaaccctcgcacagagcattcagtaggatttgcaccattaacaaccctccatgcatttgcctgtgggcattcaacatctgtcatttttttaagttataatatttttagtcatttttttcctctaaactctggataattattattcattcttatgacagcaactgtgtaatcagctgtcgaaacactgtgaagggcaaaagaaagaaagccacaaaatattgtgtttctgtgccaagattttacagcgagcaagggagagttagaaaaggaattctgagatttcagagtcttggtctcttcacctttgcttggaagaaaatatcctttcccttcattagccaacactttcttgatcctgagagtaggaaagggaacactgagtcttttcagttgaaggccgtccttgcctgctggactttgatctattgaagtggtgatgggtgttgcggtttcagccataaaggcatctggcatagtaggcaagaagggccagagacccgaggagagttatctgtctctgttaacttcagtgtatccctctagttccccagatgcacctgtttctgtaaatataaacatgcatgtcatcagaacacttaatattctgcatactgatcatgacaacaaaatgtaccttctaacacagacactctcactaggatagaccatgtaggaacatcgaattctattcagttaggacagtgatgatgtctacatattatacctctgtcaaaacctacagaatatacaacacagcacagagtgaattctaatgtagcctgtggacattaatgaataataatgtatcaatattggcccatcagttgtaacactaatataagatgttaataacagggggaattgaaggggtggtggggagatatgttggaactctttgtgctttctgctcaatttttctgtaaacttaaaaccgcacacacaaaaaaagttattttaattttttaaaaagtattcagagggacttgacctttccaaattctctcaaagcaggtcggagtagttaagaacacaaattttagaaccagactgccagagtttgaatcctggctacaccacttactagctttgagatttcagacaatttacttaacttctctgtctcattttcttcatctgtgtgataagaaataaagtaacaggccaggcccagtggctcacgcctgtaatcccagcactttgagaggccaaggcgggtggatcaggagttcaagatcagcctggccaacatgacgaaaaaatacaaaatctctactaaaaatacaaaaattagctgggtgtggtggcaggcacctgtaatcccagctactcaggaggctgaggcaggagaattgcttgaacgcaggaggtggaggttgcagtgagccaagatcatgccactgcactccagtctaggcaacagaatgagactccatctcaaaattaaaaaaaaaaaaagtaaaaagaaaagataagaaatatagtaccagcccctatctcagagttcctagcttagaaaaattcccagaatataataagtgcaatgtaagggtcagctatcttcattattattatctatcataaatgaaattacacaataaagctagatccgtttctttcctctccttctacaaaaaataaagcaactttccagaacaatacccaggtgatgatttctcccctgctccctccctaagatattggcaagtttggagggttcaaggagaaacagagcatgtagagaagatacctctctcataaccatttgtgatttacaagtcttacctgattcttttgaacttaaaggatgtaagaaggcttttggtagcttccatctgattcaaggctttggcagctgctgtggaatacatgagaacactaggtaaagcactgtcttccaacatgaagagagaaaaatatgtggaatgttcaatggcatgctttgtataagaatgcaacttacctggcaggaacaaatttctttgctgcaaaagaaaagacaaacaaccattaattcagactaaatgacttttaaggatatattaaatccagatacaatatgacttaattcatcaagtgttgcaaactcgatgcttcagggcctctgtaataatcagagcacaagcatggctctgtggcatctagggtaaaatgcaaagtgcacagccatccaaagggcatagcagcttcctaatgccagcaaatagctacggggtcatcttgcccaattcagctcccaatttttcatgagaagtccaaagtcttaatttaaatgtgagatttcctattttgtaaacgtcagaacttaactcaaaaatgttttaagtactcttaaacatgtaagccaaacaaaccatgagtgtagtcagatgtgcttccatattccttatgagagactctcaaatttaagcctgtactccaaataaatctccttaggaagaattttatccattttccttagagtgctcatcatggcagttccattgcacaattccgggaggcatcatataattcaacatgaatagcaccccctggagttgtacaatattaggcacgactaacatttttatttcctgaaacacttcccacactgagttgtactactaactcttttcttaatacttctgcttaattatactgcattttatccagattctaattattgtttaaatcagtaagcaagaccatgacttatcaatgagaaagaaatgtattttcaaaaacatttttgaagtacattcataaacttcctcacctttccgtaagcatttccgaagccagaggagaaatggtgctaatgtcaggagggagagtccagcagcagaaagtccagctaccaagggaatgttggactcagtgggagctaaggaagtaagagacgaagaaaggtcatgaggaagaattgatgttaaagtctctccgtcctgtccctttggccttttttctgtacattcattactaggagcagaagagctatctagtttaatacaagaagcagagatgtggcattacaggcctttgagatctgctccaagccacctttgaagctatttccaccattggcaggcagaactctaacttgccaagctcgttcacaataccacaccacaccttggttaataaacactgcacttgcttgctctcttgctctcactccctcttgttttccatttcccctttctcctctcctctctctgtctcctttttccagttgtcagaattctaccctttccatcaacatgcaacttctgttttttctctatccccatacaacttaatattcacaacttgtcaacctgggcgaactttctggtttggatataatgaatagttgattactgtaacaagatagctccccctttttctttttaatcaccagacaaccaccatcaatcaatgcatcaccttcacaggtaggtagcaggccagaccagtgtcctgtggctccacatgtccgagctgcagagccattgagcgtccatccttcaggacaggcgaacttgcacacagtgccaaacacgggctccccactgcagctcatgttgatctttcccggaactgccaggcttgaacattttaccactgcaaatgttaggtacacaggcagagtttcagaaaaatctactggaaaacttccaaaacttgcttaaaagtcaacaatgaatgtaaagtgtaagcgctacttagttttcagcatgtaggaaattaggaccaaacccctttggggcaatctaggttcagaaactttatgaagtatttgacctgtaccctaaaaaagtctgcactcaattctaccttggcaggaaggaacctcttctgtccattgtccctgagatgtgcactcaagttgagttgatccatgtaattcaaatccctcctcacagctgaaggcacaagaggacttgtaggtgaattctccaataggggaatgagcacacctcaccaaacccttcgggggctggtggacagcatcgcatctcacagctggaacacacgagagagcactttagaagtttgtttgcatctccagcaatacgtttcccaaggtaaccaagttcccaagctcttcaatagttctttttatcttaaaataaaataaaaacaaagactgtaccttcacatgtgggcttctcgttgtcccactcccctgtggggccacattggagccttttggatcccttcaacacaaaaccctgctcacaggagaactcacagctggacccataacggaaactgccagaagcactaggaagacaattcatgtagcctcgctcggggttggacaaggctgtgcactggaaagctgagacatcaaaatgatggtcagaaaatattgcagtggaactagagagtacttggcgtttgttgagtgaacccagttcattcaagcaacacttggagaactgaagattctttataattccctggacaaatgggaagatggctgtgttttctttgaatttcagccccctcactgatcatggcactaattaaaagactaattaatcagaacattagttcctgagcactgttcttctaacacacaaaataaattatggtccaaggaaagatttcacgcagtctgaggacaacatatgggtcatggatgtttatagatggtgccaaaaagaaagaaaagaaagcacccctataaaatttgtctgttttgcagtttggtttttgtgttatgttttgctactggaaatcattctgtgctggctttggctaggacaaggccagtgcctgatagtaaaaactgcttgttttcaatatccttgctctcactttaaagtgaattaaaatttactgcttatatatgcatcaatactatctctgtagctgacaccatgcttgaaacagtctcatcactgctaattatgagccatttcagaagacaggtgtgatgagagttttacattcaaatcatgttctcattattctgctttccgaattttctaatatgattcctttagattaagaattctgtctattccatgctaatgtctacaaagttttatcagcacatcacagttaaaaaaaaacagcaaagaattcattcttaacacatatgatcctttccctggccaaacattagttcttttaaatgaatctcaaagatacgagggttgctcatcaaatctgatttctatagttaaagtgggtattggttttttttttcactgtccaagtttgaagatggttgttctttaagaaagtataaatcgaaggatctcaagcttaccttcacaaactgggatttgctgtgtccactgcccttgagtggtgcattcaacctgggctggtccctgcaacatgaagccttcctcacaggtgaagttgcaggatgatttgaaggtgaactctccagcaggggaatggctgcacctcacagagccattctgaggctggcggacggccctgcatgtcacagctgtaacaaatatacgcattgatattagcacggcctagaattagcttgcccatttccagtatgggttgagagaaagaatgttcacagtaagtctccatgtggaacaactctacctttacacgttggcttctcgttgtcccaattcccagatgaggtacactgaaggctctgggctcccattagttcaaatccttcttcacagtcaaatgtacaggttgtgttccatgggaagcttccagggttttggaaacattccacgaacccattggctggatttgtcacagcatcacactcaaccactgaggattttaaagagcaccatgaattttacagaagaatgatcttttcacttcctattgagctgggtgcctaacagagtgaggaagctgccttcaaagggtagatcccaaagtcctatgtcaattcttagggacatgcacagccagaataaaagcttttattctttttcatggatattctatcttttctgatttccactttgcctatgctgagtggtctctaatctatgttatcatttacgtgaggtaaaaatttaaaaaaaatagattccagattaggagttatgactagtactgacatacgtaggctattcatttattttagcccatcagagcctgaagaactgatttttctttttttggcctctggttcagaaagataaaattaagagagaaaaa

SEQ ID NO: 37 - DNA, 200002 bp, Homo sapiens
cccggcctgtttttgtgtttttgaaacagagtgttgctctgtcacacaggctggagtacagtcatgtgatcttgactcactgcagcctcaacctcccaggttcaagagttcctcccacctcagcctcccaagcagctgggactacaggtgcgccaccacacccagctaatttttgtattttttgtagagatgggacttgccatgttgcccaggctggtcttgaactcctgaactcaagcaatccacctgctttggcctcgcaaagtgctggaattacaggcacatgtcactgtgtcctacccgtaaacctcctgtttttaaaaattgagatttaaatatatatttgcagctgggagtagcagctcacatctgtagtcccaactacttgggaggctgaagcaagaggattgcttaagctaaggagttcaaggccagcctgggcaacacagcaaaacataatctcaaaaaaaaaaaaaataacaaatcccagcactttgggaggctgaggcaggtggatcacgaggtcaggagatcgagaccatcctggctaacatggtgaaaccccatctctactgaaaatacaaaaaaccaaaaaattagccaggcatggtggcgggcgcctgtaatcccagctacttgggaggctgaggcaggagaatggcgtgaacccaggaggcaatctcatctcactgctacctccacctcccaggttcaagcgattctcccacctcagcctcctgagcagctgggattacaggcacgtgccaccacgcccagctaattttgttttttgtttgtttgtatttttagtagagacaccgcacccggcctggatcaccttttggtgacttctacataaaacaggtaaaagaggagtttttctgcctgataggtaaagcccccattgcttgtctccaaccctacttcccaaagataactgtgggatttggggtccagaggccatggattggaggcctctccaaggcctccttttcacttgaaaattctggaccactgcatctttgctggaataaaagtccacaggtcgaggacgttgcaggggaaagcagtgtgtgcagaagcaggagcaccagggtccagcctagagaacactcacaggaaccagtccacggcaatgatgagcgtgatgtcttccgtgggcaagccgaccgacgtaagcacaatgaccatggtgaccagacccgcctgggggatgccagcagccccaacactggctgctgtggccgtgatgctgcagggggagggagaacatggggagcagatggagggaagaaggcgatgaggaagagagaggaaaaggacagagagaagggaagagatcagctccccaaggcattttaaattaaatacccaagccagacacagagagaaaaatactgcttgatgcctcgcctcgcctcgcctcacctcgatccccacccaccccgcccctcccctcctcgcctcaccttgcccctgcctcgcctcctctctctctctcccaggctgaagtgcagtggtgttatctcagctcactgcaactcactactcaatcccaccttaacctcctgagtagctgggaccacaggcacatgccacaacgcctggttaatttttagtagagatggggtttcaccatgttggccaggctggtctcgaactcctgaccacctcgaactcctgatccacccacctcggcctcccaaagtgccagaattacaggtgtgagccaccgcgcctgacagagcttacattctagtatgggaagcaggcaataaacaaaatgaataactaaaattcatactatatggagatagtactacacggggaaacagtgcctccttagcaagacccgatatgccattttaaacagggcttccctgaaaaagtaacgctgaagacctgaaggagatgacaatgttcactgttatttttataatgactaagttggaaccactggatgatgggacctataaatacaggaataaataaatgtatagagcctacaaatataagaatctatatacaagaacctcgggttatcaggatgcaccagccatgctttggaaaacactggacaaatggatctcccacgtgagagggaaactgacaggaacgtcttggcagctcctgacagcctcaggtggcaactttacctttcacctacctcatccggcattgggctcttcccacatcccgcttccaacatccgtgggctcctctgagctccagctgaggccccctcctccctccccaaccctcccagccaagctgatgaccgcttaagtctcacctgctggcaggtcctacccaagccccctcacctgatggttgtgatctgacccaggttgagctcgtagttgttaacttgagcaatgaagatggcagccagggcctcgtagagggcagtgccatccatgttgaccgtggcgcccacgggcaggacgaacctggtgatgcggcggtccacacccaggccctcctccaggcagcggaaggtgatgggcagcgttgccgagctgggggaaagagcccaggactgaggatggggcgtggcctggtgggggcggggctgggaacagggtgtggcctagtggggcagggcagagaatggggcgtggccgaagaaaggctggggaacagggcgtgacctagtggggtacggctgagaatgggtagggctgggtcacatgggcggggctgagaacaggggaggagtaggtgaggcggggctcagagcaggacgtggccaggtgaggaagagctgagaatagggcgtggcaaggcagggcggggctcagagcagggcatgggctgggcgtggcctgggcagaaatgagcccaaggagcgttccccttgagaacattgagcaggccaggtggggggctcctcaagatgcagaagacaagggtataacatttcagaggctgataactgtacaaaggaaaggagcaactcctcatgatacaggaagaaaacagcaatgagggtctcccaagctgaagatctcttcacccacttaaagccaatagctaaggccaatgactacacactagtttatggcagtagttcgttctacctatccatttccaaaaaggacaggaccaaaggtctgctgacttcagggagggcccctactccagactcccctgtttgcaccagcattgacctcagctgtgctaactttctctatccatctacccgccatgtcttatcggagaaaagtgacctaattgattggcgagtttagtcaaagaagtgggcatctcatttggggtaagtctgtccacaaggcgtgtgttctgtggtcagctttacatcatacggttggaatcctggactcataagagagtctctgggtgtccagctcagcggtgactatgtgagtttaattctaggatacagtgacatcagtcttacctagccatagaccaagaggcacattccctgaccagcgttatgggcaattttaaaaattatatttttgatcaggtgcagtggttcgtgcctgtaatcacagcactttgggagagcgagacgggcagatcacttgagctcaggagttcaagacaagccatagccaacatggcaaaaccccgtctctaccaaaaacaacaacaacaacaaaaaaaacttagccgggagggctaaaaaattagccgggaggactggaatcaggcacctgtgattccagctacttgggaggctgaggtgggaggatcacttgagcctgggaagtggaggttgcagtgagtggagatcacaccactgcactctagcctgggtgatagagtgaggcctcatgtcaaacgaaaaagaaaaagaaaaaaaagatatttttggccgggcgtggcggcttacacatgtaatcccagcactttgagaggccaaggtgggcagatcacatgaggccaggtgttcgagaccagcctggctaacatggcaaaaccccatctctactaaaaatacaaaaattagccaggtgtggtggtgcatgcctgtagtcccagctacttgggaggctgaggcaggagaatcacttgaacctaagaggcggagcttgcagtgagccaggattacaccactgcactccagcctgggtgacagagtgagactctgtctcaaaaaaaagaaaaaaaaaattcttccatctttttggctgttgtgctacttttcaaatttgtttttgaattgggatgatgctcttaattaatcccctaaaactacaaaagaagaagaggaggaggaagaggaggaagaagaaaaaggaggaagaggatgaaggggaagaagaaggaggaggagaaggaagaagcagcagccaagagatctcccagacaccatctcacaagtggagatgacaccctctgagctaggaaatgactgagctcatggggcatcctggaaccttccctcttaacctcaaaactggtacctggttctcctccacagaaagttaaaaaacaggaaaggagaaaaggagaccaggagagccagcccaggacaatgactggaccccaggtgttgacattatgagccctggacattgttggacgactcagaagaggtgtttaaggaatggagagggcaggtgccttaggagaggacatgaaggacaagaagtgcaaccaggaatggtgctggggtggggagcaaggccatacctggaagacgtgcccatagcggtgatgagggcttgtagcatgcccccaatgaaggggaaggggttccggtgagtgacgaggaagtagatgaggggaaggacaatgccggcatggaggaacaggcccacgatgacggtcagggtgtacatgcccagctgaccccccaggacggccatgtcttccatctccagaatcttcccagcaatcaggaacaggatgcccacaggtgcatacctgtgtgagggagccacatacctgtcagggctccctcctgacctcccttgcaggtctgaaggtggcatccccaaggctttgcccatatagggccctggagccacacaatacccatgatacggcaccctactccatcccagtcttccccgtacactaatgaatgccaccgggccccatgaatgaagcccacctcctcctcctcctgctcttccacatctccccaccatggtagaaaagttcctacaactccaggatatacaagctttcaggtctctcctgtacctactccccattcaagctctctcaatcctgccccaaataatcactaccttcagtttccttccttagacattgccaagacattccctgtctctggccttctaagcttcccttatcttctgcccccaactgtttgttccacatttgaaatgtgtatgcccctattctcttccctatcagtgcctgttatcactcattcaccagcctaagcatttccctctcaaaccacttgtcctatcaaaatcaccgatgtattcattcattccacagatattgactgagtacctactgagtaccaggcacatggctctcgtcctcaaagcacttacattctgttatggactaaatgtttatgtcccctccccactccaaccaaattcatatcttgagatcctaacccccaatgggatagtattgggaggtgattaggtcatgagggtagagccatcatgaatggaattagtgcccatataaaagacacaccagagagctccctccacccttctgtcattcgaagacacagcaagaagacgccttccatgaaccagaagacagccctcaccagacatggaatctgtgggtgccttgaacttagacttcccaccctccagagctgtgcgaaatacatttttgttctttaagccacaatgtctatggtatttttgttacagcagctgacatgaactaagacacattctaatggggaaagcaggaggtacacatagaaatgcactaattgcaaacttcaagtggtgataacagcaaaggagagtcactggatgggactgcttctgagcagatggtcagagagggcttttctgaagaggtgacatttaagctgagacttgcatgatgagaaggtaccctgtgtatctggaagaaatcattgcaggcacaatgcagactctgagatgggcatgcactaggagtgctggaggaccagagagaagaccaatgtggctggagtattgagtaaaaaggagaatagagaagatgaaagaagcaagttcatcaggggctcacctgtttccccccataatccagcccacgggtcaatcgagtgagtttctgccattggcaccatcatctcatttcgaggcttcaatggctactcctctttctttagaaattgaagtttatggctgggcatggtggctcatgcctgtaatcccagcactttgggaggccgaggagggcagatcacttgaggtcaggagttcgagaccagcctggccaacatggtgaaatcccatctctattaaaaataaaaaaattagtcaggtgtggtagtgcacacctgtagtcccagctactcgggaggctgaggcagaagaatcacttgaacccaggaggcagaggttgcagtgagctgagatcacatcactgcactccagcttgggcgacagagccagactgcatctcaaaaaaaaaaaaaaatttgaaatctactttggctcacattcatcgtggatgtgttggaggaggtggggacctcttgggaaggtggtacaatagcttgagtcaaaaatgaggatgcacggggcttctccagtcacatctgtgttctccaaactgggctcagagttagccctggggagtagttgctgagtcttctccaagtcaacatgactagatccacctctatgcttactctgagtaatccctctctcaacttcctcacctccatccttccacctcatcccctgcaaaattcctcagcccaagattaattgtgcatgatttcttaccccctacactcagccacctggcacatctggacatttcacccaatcatgccaatgacactgctataaattcattgttcccaattcagctgagccttcattattccttgttaactctctgcttatccttaataagctccccactcccattcctttcagatgcttttccaggccctcaacttggcctcaagttccttatatgaagaaagtaaaagttcgtcttcaaagtttcccttcttgttaaagaataaatcttaagtgttaaaaatagtttcttttaaagactaacttccttcaagcctccttactttatgctaataactctttgttaagccctatcctatgtaggtgttagacacgctcacaggcacatagtacattctacgtccttgtactttaaccaagatatctgtgctggatgtgctcacaggcatgtcccagcttgcagcctataccccttccttatttgggaatgttattacttttctaagtccttttgtaagcaacttcctcttttcctctgttttccattgcttttacctatttagaaaagttttaaattattagccagtcgggatttagtttagattgtaaagtctggctccagccaatggagacagacacagtagcagggacaaactgcataagggataaaaattgcttcttccctcctttgttcaggtgtgctcttgccattgttccatctgtgatgaacaccctttctgcagaagtaaaaattgccttgctgagataattaaatttatgtttgagtgctatttctttatggcactggggaacaagcattctgtttctaaataaacattttacatatgacactatacaactttccaattgtttgggatgatgtacaaagtcttctcccatttgggatctgacagccttgttaatatcttccaccaccactcccaacttaccccatgctctcaccttcctgaatgccccaccattctccaaacaacttaggtaccttcaagctttgcatgttctcttctctctgcctgaaatacgtctcccctctcactgtccagttgaagtcctactcacctgtcaagacgcagttaacaggtgaccttcttcatgactccctcttcaggaagcattcactgcgtacccctctactcactgcttccttctccaagttcccaacattttttaaatgttcctttactacagaacctaccaccttgtgttatattgatctacaatgtgtctgtctcccctaagattttgtgagcttgttgaggacaaggtatgagtgcactgtatctctgtactccagaggtcaagacaaagtctgcctgggaaaatgcctgctgagtgaataaagatatttctgaagtaataaaggaatctagagaaggaatgatggaaggaaggaaggaaggaagggattaacaactggatgaataagtaaggaaataagcaaatgaaacaagttagtagctgagtgaacaaatacgtgaacaaatgagtgaatgaagagaatacttgaataaatgaatgaaagaataacaaatgcatagatgaatgagtgagtccaagaatgaattagaatgaataaatgacttaactgagtaaataaacagatgaatccatcaatgatttaactaatgcatggatgagtttgtaaataaatttacgagtgaatgaatacatgagtgagttaactgatgcatggaagaatgaatagatgaataagaaaatgaatgaaccgatagaaaaatgagaatgaataagtgaataaattggtgaatgaagagatacatggggaagtaaatgggtgaataaatcactgcagaaaggtatgaatgaatgaatagtaactaaccaatgcataggagatgaataaatccctgtcacttgtgacaacacagatgaacctggaggacattatgctaattgaaataaccaagacacagaaagacaaataccacatgatctcacttatctgtggaatctaaacaatcaaactcacagaagcagggagtaaaatggtggttaccagggactcgcaggaaagggagattggggagatgttgatcaagggtacaaaatttcagttaaataggagaaataagttcaagagatctattggacaacatggtaggtatagttaaaaacaatgtattgtgtacttgcaaatcacaaagagagtagattttaagtggtctctccctttttttttttttttgagactgggtctcattctgtcacccaggcaaccacaactcactgcagcctctacatcccaggctcaatctgtcctcccgcctcagcctcccaagcagctgggactacagctgcatgccaccacacccagctaattttttttgtattttttgtggtcttgtcatgttgcccaggctggtctcaaattcctgggctcaagtgattctcccaccttggcctcccaaagtgctgagattataggcatgagccaccacaccctgcctagatcttaagtgttctcaccacaaaaaaataagcatgtgaggtaacgtctatgttagttagctcaactgaaccattccacaatgtagagatatttcaaaacattatgttgcacatgaaaatatatacagtttttatttgtcaattaaaaatacattaattttgcaaaataaataaatgaatgaccaaataaatccagaaaccaatgcatgaaagaataaatgtagctgaataaatgtcagtgaatggcttggtcaatgtattgaagaatgagtgaatgaacagataagcaagggagtgaacaagtgaacaaatcattgcagaaaagtgtgaatgaatgaatgagttagtgagttggccagtgatttaaccaatgcatagatgaatgaataaatgcatgaggaaatgagtaaatcaatgcattgaagcatgagtatagatgaataaatcactgaatgagtgatttcatcaatgcatagaagaatgagtgaatgaacagatgaacaaagcagtgaatgaatcattgcagaaggacatgaatgaatgaaagagtgagatattccatgaactaaccaatgcatagaagaatgaatgaatgaacagatgaacaaggaagtcaactagtgatgaaatcatcccagaaagacatgaatgaatgagttggtgagtgggtaagtgaatcacccaatacgtaaatgaatgaccaaaagtccccagcaagcccttcggcagcttccccacagcctgacttcccagctctggctccaccatcccgtgggcacagaccaggactcaccagataatgatgcccaccagcctcataatagcctcattgaggctgtcgaagaagtccctgaggactctgcccttgtgtttcatgccaccaatgaccagcccaaaggccacagagaagaccacgaggcccagggcgttgatgccattggcggagccaggcacgggtacagtctcctcaaagctcagcatctcctgcagggtacccaaggcccgagtgacattttccaggaagctggttccgttctccactgagaatggaggaggcatggaggcacccggctcagacccgttctctgtcctcaccatggtcctggttaccaccctcgtgctgtactgcgtcttgaactgaaatagagagagattgcgcccagattcaattcagcggatgcattagaatcgcctggagaaattccttgagaccactgattcccagttcccacaccctggaagatcgataagatcttcattatcgattatcactcattatcgactatcactcattcagcagatctgaatgagtgaatgaatgacttgaatagtgcatggaagaatgagcgaatgaatcagtaaacccattatgaaaaatcatatggagcttcctcaaaaaattaaaaatagaactaccggccgggcatggctcacgcctgtaatcccagcactttggaaggtcgaggcaggcggatcatgaggtcaggagtttgagaccatcctggccaacatggtgaaaccctgtctctactaaaaatacaaaaattagctgggtgtggcagtgcgtgcctgtagtcccagccacttgggaggctgaggcaggagaatcgcttgaacctgggaggcggaggttgcagtgagctgagatggtgccactgcactccaacctggcgacagagtgagactccatctcaaaaaaacaaaaaaaaattgaactaccataggaccagcaatcccactactgtatatatccaaaggaaatgaaatcagtatctcaaagagatatctgctctcccatgtttattgcagtactattcacaatagccaagatatgaaatcaacctaagtatccatcagtgaatgaatggatacagaacatgtggtatacatatacaatgaaatactattcagccttgaaaaaggaggggatcctgtcatttgtgacaagagggttgaacctggaaaacactgtgctacgtgaaataaaccaggcacagaaagacaaatattgcatgctctcacttatatgtgaaatttaaaagagttggactcatagaagcagaaaatagaatagtgcttaccagggactggggagcagggaaattggggagatgttggtaaaaggacacaaaatttcagctagacaagagcaataagttcaagagctctattatacaacatggtgactatagctaataacaatgtattgtgtatttgaaaatcaccagaagggtagattttaagtgtctttatctcaaaaaatgttaagtatataaggtaattgatatgttaataagcttgattgagccactccacaatgcagacatatttcaaaacatcatcatacctcataaatacatataatctttgtgtgaatttgaacataaataaattaaaaatattttttgaagaataagtgcctgaataaatgaatgaggaagtgaacaaccaatgtgtggaagtagtatagattctgaatttttcacaagctccctgagcaatgcttaaccagagttgagggcctctcccctcaaccatctgtggtcaaaatttctggaatctctacaccagccttgttgcctcctctagccctgtgctcaggaagtccttggcctaagtcctcttttttttttttttctttttttgatatggggtcttgctctgtcacccatgttggagtgcagtggtgtgaccactggagccttgatctcctgggttcaagcaatcctcccacctcagcctcccaagtagctgagacaggcgtgtccagctaatttttttttaatctttttttttttttgaaagacagagagtctcattctgttgcccaggctggtcttgaacttttggcctcaagtgatcctcccaccttggcctccctaagtgctgggattacaagcctgatccaccattctcggacctaagtgcttctccctaacccccccagatcaccatggaaaatacatcctttctcctagactcctcaagaacccctgcccattgctctgtcaggcccttcctcccgcctcttgcccttggaccatcccttcagccccaagctcccaccaccctccgaatctccttgatcaaactgtgtacttccccctgacctgtttgaagcaggcctccacaaggtttggtggaaacatatttctgcagaaaaacatgagaagaaggaaagtggttagaccatggaagggcatctagggtgataacagtaatactaacaccaagaacaacaatagtgcagccaacatatgaatgcttcctctaggctgggcactgagcaagcatcttactatcatctgattaaaacactacaataaccctagacatgagtcctattgaatgccgcctttcacatagaaagaaaccacagcccagagaattgatgtaagctacccggagccacagagctgctaagaggtgcagatggccctcaaatccaggtctgtctgagcatgtggccagagccctacatcacctcaaggactttaattcaaacacacatgtgtcagtgatgcctcaaaaaaccacagaaaactcttaaacccttttaactttaggtttcgtctaggcccatgattaaggtagaaccatggctagccttgattctgtgtggcaaaaatcttgctgctttaattaaaattaaaaccacaatgagataaccaccttaaccccagctagaacagccatcattaaagagtcaaaaaactatagatgttggcattgatgtgggggaaaggggacacttacacactgctggtggggatgtaaattagtacaacctctatggaaaacagtatggagatttctttttttttttttttagatggagtcttgctctgtcgcccaggctggagtgcagtggtgcgatctcggctcactgcaacctccacctcccgggttcaagcaattctcctgcctcagcctcccaagtagctgggattaaagttgcccaccaccacgcctggctaattttttgtatttttagtagagacagggtttcaccatgttaggcaggatggtctcaatctcctgacctcatgatctgcctgcctcagcctcccaaagtactgggactacaggcgtgagccactgcgcctggctgagagatttcttaaagaactaaaagtagatctaccattccacctagcaatcccactactgggtatctactcaaaggaaaagaagtcactatatcaaaaagacacctgcacacatatgtttatcacagtacaattcacagttgcaaagaaatggaaccaacctaagtgcccatcaactgatgagtgcataaagaacacatgatatatgtacaccatggaatactactcagccatgaaaaagaatgaaataggctgggtgcagtggcttacacctgtaatcccagcactttggaaggctgagatgagtggatcactcgaggccaggagtttgagaccagcctggccaacatgatgaaacgctgtctctactaaaaatacaaaaattagctgggcatggtggcaggcacctctaatcccagctactcaggaggctgacacaggagaatcgcttgaacccgaaaggcagaggttgcagtgagctgagatcatgccactgcactccagcctgggcgacagagtgagactctgtttcaaaaaaaaaaaaaaaaagaaagaaataatgtctttggcatggttggagctgggggccattattctaagtgaagtaattcaggaatggaaaaccacatacagtatttctcacttataagtgggaactaagctatgagtatgcagaaacatacagagtgatataatggactttagaaactcagaagcgggaggcggggagagtagttagaaattaaaagctgcacattaggtacaatgtacactactagtgggacggatgcactaaaatctcagaattctccactatataattcatccatgtaacaaagaaacacttgctccccaaaagctattgaaattaaaaattaaaaaatttttcataggccgggcacagtggctcacgtctgtaatctcagcagtttaagaggctgaggcaggtagattacttgaggtcagcagttcaagaccagcctggccaacacggtgaaaccctgtctccactaaaaatacaaaaattagtccagtgtggtggcgtgcacctgtaattccagctactctggaggctgaggcacaacagaaccctggaggcggaggttgcagtgagccaagctcatgccactgcactccagcctgggcaatggagtgcaaaaataaaaataaaaacaattaaaagagtaaaggcaactattaatagcaaaaatattttttaataataaaaataaaaaatcaaaaatttagttaattttttaaaaaatcgtgctgcttctatttacaatagcaaagacttggaactgacccaaatgcccatcagtgatagactggataaagaaaatatggcacatatatgccatgcaaatactatgcagccataaaaaagaatgagttcatgtcctttgcagggacgtggatgaagctggaagccatcattctcagcaaactgacatagaaacagaaaactaaacactgcatgttctcactcataagtgggagttgaacaatgagaatacatggacacagggaagggaacatcacaccctggggccttttgggggctgtgggggcaaagggagggggagcattaggacaaatacctaatgcatgcggggcttaaaacctagatgacgggttgataggtgctgcaaaccaccatggcgcatgtatacttatgtaagaaacctgcacgttctgcacatgtatcccagaacttaaagtaaaaaataaaataaaatataaattaaaaaatcatgctgctctaagagaatcattcaccctccaatgatgcttaggcaaataccagctgttctgaccccaccttaagggtcatatcctaagatcatattctagcagcagctgctgttggagaatatatacaaggctccagggcagaaattgggtaccacaagtggatactatgggtgctgctatgtccaggctgcgggagcctgtcccctttgtctctccttcagtatgagttgttgcaagtagagtcagaaatcatatcaaaatgagtacagtcacctgtaaactaaaagtaacacctaagccaccaccaccaccaacagctgaacagactctcttgtggccaagtggaccccagaacaactttaaaactgagttcctggccatgatgggacaggaggtcagacacgcctccttacactctctcccttttataatctagacacaacaactaacccacattaatgttattaatgcattaaattaaaacagaaatcataagactgatagaacaggctctttggggcaataagataccaaattataaggaggatctaagaccatgccacgcaggggttaagtcatggaccctacgctcaaagaataaattgtgttctagctgtcaaaaggttcttctttttctctaggagttaaacaaacactagtcttatgataagcaatattaaaataattacaactcatcagctcacagacaaggactaatggggcccctgttccaccagccataactacagctttgattggacaagagactgatttcagtaactttctcctgataacaccactgaccatgggctggttctggctcattgacagaggctgtgcatttgggtaccttcgtgtcctgaaaagaccttttgatgtataaagcctaaatgtgatacatttaaatgttaagtaaatgttaagtatccaccccaaagtggacatggggtcatatgttacatgcaactttcttcaatatgcatgcatcagggccacctacatgaatattcatagctcctcctgtaacctgttgaatatgcatgtttagccaacccattcagcataaagctcctactccaacccctcctccttagaagtgcccgtctctgctcttgaccggacgcatgcttcccagcctgtgggatgacctctttgcaggctataatcttttacaataaataaagtctcctttttcaaatgtgtatattgtggttttttaggttggcacacctgatcaggtccatgaaggcatcagctgtggggatggtctcgatccggccctcccggtgcagcccctccttggagcccttcccgggatggatgatggtgaccatgaggatgccgatgaagaccgcgatgatggtggtcaccatgtagtacacagctgcccgcatccccatccgccccgtggccttgttgtccagggatgccatacctgaaggacagatgatgtggcccccgcagctccatgcatacccaacgccagctctcctagcatccgttccaccctccccatatcaccaactcaacagccgacccaccaagcatcccttttcctatagcccaccccaaaacccacccattacccattcacccgcaccaccatctttctacttctaattttccaaatacacaccctcacacgccatcccaacccttatcccaagcagcactccactatcctactgccttccctctactccaagccaccttttccacactttcaccccatcctctattgagtcttgttttctcttgttttgcaccataacctaactattttttttttgagacggactctccttcgcccagactggagtgcaatggtgcgatctcagctcagtacaacctccatctccccagttcaaacaattctgctgcctcagccttccgagtggctgggattacaggcacctgccaccatgcccagctaatttttgtatttttagtagagacggggtttcaccatgttggccaggctggtctcgaactcctgaactcagacgatccactcacctcagccttccaaagtgctgggattacaggcatgagccactgcgcctggcccataacctaactttcattccacttgtcatcccactattaatcccaaaatcacaccttcctccaacccacctcacggcgcaccctttgtggcacatattcttggtgctccactcctacaccctttcccaagccaatctgctgatccttcagccccgagagcactgagtacaatagctcaggctgcccacttctcctgagaattgccctcagcaaaatgggagctgccttgcccatagaaaccccaggggagacctagagccaaagaatgactgtgcagggattcacaatggccaactcctttgattcaggtggcagtagagctggggagggattcaattctgtggttctgctcacactccagagctccccatgagatgaggctgagaggccagccttcttttgaaacccacatctttgcttcactggtttcccagccctgtcccacttccttcacttccttgcgagtttctcttgagagctatcccgcaataaatcacctgtgcagatatccccatctcagtcaggctctgcttctaggaaacccaacctaagaagccatttcttcatgcctttttcttcttccccatccccaaatccagggattggcaaactgctactcatgccaaatccggccctctgcctgcttttgtaaataaagttttattggaacacaaccatgcccatttgttctcatattgtctatggctgcttctgtgctgcaatggcagaatcgagtacaattgacccttgaacagcatgggtttcaactgctcgagtacacttatgcatggagtttcttctgcctgtgccacccctgagacagcaagacaagccctcctcttcttcttcctcagcctactcaacatgaagacaaaggggatgaagatctttatgatgatccacttccactcaattaatagtagataacatttctcttccttatcatttttttaatagacagggtctcaccctgttgctcaggctagagtgcagtggtgccatcacagctcgctgcagcctcctgggttcaagtgatcctcctgcttcagcctctcgagtagctaggactatgggcatgtatcaccatatcctgctgattttttttattttatatagagatggagtctcactgtgttgcccaggctgatctcgaactcctgggctcaagcaattctcctgcctcaacctcccaaagcactgtgattacaggcataagtcacctcacctggcctgattttcttaataacattctattctctagcttactgtactttaagaatatagtataatggccgggcggggtggctcacacctgtaatcccagcactttgggaggccaaggcgggcggatcacgaggtcaggagatcgagaccatcctggctagcacggtgaaaccctgtctctactaaaaatacaaaaaattagccgggcatggtggcgggtgcctgtagttccagctactcaggaggctgaggcaggagaatggcatgaacccaggaggcggtgcttgcagtgagcggagattgtgccactgcactccagcctgggcaacggagcgacactctgtctcaaaaaaaaaaagaatatagtatataatacttacagcatacaaaatatgagttagtcaactgtttatgctctctgtaaggcttccagtcaatagtaggctattagtagttaagcttttcgggagtcaaaagttacatgtgagccgggcgtggtggctcatgcctgctatcccagcactttgggaggccgaggtgcgcagatcatgaggtcaggaaatcgatatcatcctgaccaatatggtgaaaccccaactctactaaaatacaaaaaattagctgggcgtgttggtgcgtgcctgtagtcccagctactcgggaggctgaagtggaggaattgcttgaacctgggaggtggagattgcagtgagccaagatggtgccactgcaccccagcctggtaacagagcaagattttgttaaaaacaaaagaaaacaaaacagttatatgtggattttttactgtgtgggggttggtgcccctaacacccaaattgttcaagggtcaaccctagttgcaaaagagaccatatggcccttgaagctgaaaatgtttactatccagccctctaaagcaaaagtttgtggacccctgcataagccaaccatactcccatcccaccctctacccactaagctgtcacctccatctcactcaccttccacaccttaatcgacaccccactccctgcacatccataccatagcccagccaccctccctggttgcccttccaagactttctctcacttctttgtgatactaagccccttgcaggctggcattttacctccaaggaaaaggacaggaagcctactgagatgagtggtgtggggtcatatggggtctggaacctgggaccgattgggacctgggctttgtttggccaaggacgctggaccagacacaggctccatgtttgaggtgccgcgtcaaggaagtggtcccatgcttgggatggccttggctctgggttcaagctgaggctctagacgggtcttggaggccaacactggcctgggctctctcacctgtgaccaggctggagacaatgagaggtaacaccagcatctgcagcatcctcatcagaagctctccaggaaaagagaagtacttgatctggcggtaggtgagctgatatgggcgcagggcaaaggccaggctgacccctagggccaaaagaaggggtccatggactgaagtctgggtcgctcagccccaggcagggtccatccatcccaagaagggtagggcaagggtgggagtgagggagagaaatatcctatgagtgtgtgtatttgtgtgtgcactgatgtgtgcagacattgtagaaatgtatgcatgtatgggttaccatattgatattgtgtaaatgtgtgtccgtgtctgtgcaaatgtaaatgtgtaaatgtgtgtgtatatatccaggatatgtgacggtagacattcacttgtgaacaggtataggtgtctgtatacaggggcatatacacatgaatctgcacaggtgttttcctggacatctataggtgtgatttgtgtgtatcttactattttcaaacatgggagtgtacgtgttcttaagctcataagtgtgtgcacgtgtactcaagagaatgcatgtagagatgtgaatgtgtttataagttccaacatacatgcacaagtgtgcatgtttgtgtttgcacctataagttcaatgcacgcatatgtgtgtgtgcatagtaaagtgtttgtacattgtatatgtatatatgtgagtgtgtgtgtacacatggatatgcatgtaacattgtgtgcacacacagttgtgtttgcacacatgtgtattcatctgtgtggtgtgtctttatgtggggggttgagggtgactggtgggactgggacgtgtgtgcaggtgagaatgaaggggtgcagcaaagagatgtgtagaggccaggaatttccctgaagtccccgcctttccctgaagtccccgccctccaagaggcagagctcaccaatgaccacggcgctgaccgtcagcagaatgaaggcgtttcggcgcaggaagcgcagcacgtgctcgagggtcatggtctgcaggcgcaggcgcgtgcgcagtgctctctgctgcaggctttcctgcagccgctgcagccagcccacccggcccagccgctggccgctctcccgcaggaacaggctgttgccatggctgctcatggtctatctgcgggaaacagagaagcctggggctggtgagggccaggacagaaggccggcgtgggcagatggcgaaggctgcgaagggtaatgagcgcttcctgaggactctcagaaggcgggggtggctgggtgttttggctcacgcctgtaatcccagcactttgggaggcagaggcaggagaatcacttgcgcccaggagttcaagactggcctgggcagctaggggtggtagtcctaaatatttgggaggctgaggcaggaggatcacttgagcccaagagttcaaggttacagtgatctatgatcttcccagcctgagcaagatagtgagacctccacccctccaaaaaagcacaaaggccaggcgcagtggcccacacctgtaatcccaacactttctaaggccaaggcaagaggatcgcttgagcccagaagtttgaggctgcagtgagctgtgactgcaccactgcactccagcctgagtgacagagcacagccctgtctctaagaacaacaagtaaataaaaatataactaaaaacaaaatggcaggggagggggaaggtaagtctgttgcgatgtgcccggttctaaggacaggtcttggcaggaaaacgtcaagtctccagaatcattcctgagaatggctgggaagaggaggaaaccacaaaaataatggacctttttgacacaccctgactccagcccactcttatttcactgagatcatcacaagcctctgggggctgccccagtggctcaagggaaattaacaagcctttgtgaagtgccagctgcatacggagccctagacaaagcacccggaggctagtcccccaaattaggacggttttgtgtccagcctggaggcttttcacaaggacaaaatcagcaggtgcctggcaaacagcaggtgcccagtaaatgcagctattctgcctgaatgcccaggtgagcaacagggagagcggggagtcaggagagcggggagtcccttgggaatgaaatgataatgattcttggccacagtgtgatgttcatgagcccctctggggtggcaggcactgtactgatgtttcccaaactgcaggcttttgcgtctcctctttatatttggccatatccatgtgtccttattcacttacctaaaaaacagtaccgaaccaggcgtggtggctcacgcctataatcccagcactttgggaggccgaagcgggcagatcacttgagctcaggagttcgagaccagcctggccaacacagtgaaacaccgcctctactaaaaatacaaaaattacccaggcgtggtggcaggtgcctgtagtcccaactactcgggaggctgaggcaagagaatcacttgaatccaggaggtggaggttgcagtgaaccgagatcgcaccacagcactccagcctggacgacagagtgagactctgtctcaaaataaaaataaataaatacttttaaaattaaaattaaaaatgtatctaaaatggaaactttagacccctacttgaaatgtgaattatatttttcatcaacattaaataaaatgcatataaaaattaaaacttgcccatctgtctaccaactaaacacctcacgtgtacagggcggctcagaaattgtgattttcatgggcctgaggaacttttctctttgtgcaccccttccttcattaaaaaaaagcctacattaaaattctatttcacaactgcattcatataaagaaaaatatgttatttcagaacgagatagaggtgacaattattgcacaacataatgaaaatactagatgctattgaattatatgttttcaaatggttgcttttgtgttatgtgaattcccctcaattttaaaaattgagccagctgctgtggctcatgcctgtaatcccagctacttgggtggctgagtggggaggatcacctgagcccaggagttcaagacctgagacagaatgtcgctctgtcaaccaggcaggagtgcagctcactgcagcctccaactcctgggctcaagtgatcctcccacctcagcctccaaaagtgctgggattgtaggcatgagacaccgcacccaccctaaaaaaattaaaaattaaaatgaatatgttaatattctacattataacattctttcacctaaatgcttgtttctgtcttctgattttgaaagagatgaaaacatcagggaaatagtagaattgtattagaggctgggaagggtaggcgggaggagaggatggggagaggttggttaacagatacaaaactacagctagatagaaagaatgagttctggtgttctgcagcaccgtagagggactatggttaatgatcatttattctatattttccaaaaagccagtagagaaggttctgagcattcacacattaagaaatgatcaatgtttgagatgatggatgtgctaattaccctgatttgatctttacgcattgtatgcatgtatcgaaatgtcactgtatcccatcaatatgtacaagtattttgtatcaactcaaaataaaagggaagcaaaaaaaatgaaaacggccagggcgcagtggctcacatctgtaatcccagcaatttggaaggccgaggtgggcagatcacttgaggtcaggagttcgagaccagcctggccaacatggcgaaaccccatctctatgaaaaatacaaaaattagctggatgtgtcacacgcctgtaatcccagctactccagaggctgaggcaggagaatcgctttgaacccaggaggcagaggttgcagtgagccaagattgcaccactgtactccagcctgggtgacaaagccagactttgtcaaaaaaaaaaaaaaaggaaaaaaaaaaaagaaagaaaggagggaagggaacggaagggaagggaaggggacaaagggaagggaagggaaggggacaaagggaagggaagggaagggaaggaaagggaagggaagggaagggaaggaaagggaagggggaagggaaggaaagggaaggggacttttctgtgggtccctaaaagcactgtgtgctataggtactatacctcctaacctacactgttctcataaccaagaaagggtggtgcccttcttccaggcatactgagaattctgttcttccttctagacccactcttaggctccctctcccatgggctccctttcgatctacccagtggaaaggacaacagtatggagatttctcaaagaactccatcccatccagaaacctccctactgaatatccaccccaaggaaaacaaatcattgtatcaaaaggatatctgcactggcatgtttcatcacagcaatattcgcaatcgcctagatatggaatcaacctaagtgtccaccaatggacgattaaagaaaatgtgatatagataagtttatcatattatagataaatagatctgtatcacatttatatcaatatcacattttcttgctacattgttgattacagtattttatctatgtttcattatgtatatcatggaatagtaatcagccataataaagtgtcttttacagcaacacacatacaactggaggccattctcttaagtgcaataattcagaagcaaagtgtaataccacatgtttacttatttttagtatttttgtatttttagtagagacggggtttcactgttggccaggctggtctcgaactcctgacctcaggtgattcacccacctcggcctcccaaagtgctgggattacaggtatgagccacagcgcccggctgccccccatctacttcctaagggatcaaggctccctgatattttttctcacccgcaccccagccacacccccagtacctgaattcaaccaggtcgagctgcaggtttcttggaggtctcagttttaccagtacgtaggtccctggcctttgtgttttgctgccactggcttttctgggatcttccttgccctcctcaactccccaccatatccaagggatgggaaatctgccctgattttccagatcctgcgtcctctagagctaatccaaattcccaatgccaagccccacttaggatcctgctccaaatggacccatctcctgaaaccacaatgctgcttctccttgctgtgaaaaaaaaaaaaaaaaaaaatcccaaagagtgaaccacagactacacagggaatccctctgggatattatgtttccagtccctaagccacagcaggaagttgcctgtagataccaagggagatcattcagctaagatctgaacagtcaggaaaactcccgaggctagagttttgtccggttcctttctcttccttacaagacataatacggtattgacaaactatggtctgctagtcaaattcagcctactgcttgtttttgtaaataaagttttattggcacacagccacactcatgcattacctattgtctacagctgctttcaagctacaatgcctgagttgagttgttgggacagagattgtacgggccacaaagctcaaaatgtttactcttgggccatttgctgaaaaaatttgctgacccctggagaagagcagacagcacttagcatctgtgggccagacgcagtggctcatgcctgcaatcccaacactttgggaggtgaaggctggagaaccgcttgagcccaggagttcatggccagcctgggcaacatagccagaccctgtctcttttttaaaaattaaaaattagccaggcacggtggcctgtgcctgtagtcctagccactcaagaggctaaagcaggaggatcgcttgaacccaggagtttgaggctgcaatgagctatgatcgtaccactgcactccaacttgggtgacagcgtaaaaccctgtctaaaagaaaagaaaacagcatcttagcacctgatgaccataaaatagttgccaactgtggttgataaaaagcagaaacctaactcacacaaaattaagaatagagtaaaatgctacagtgtgagaatgtcttactatcaatttttctcagtcctgtctgcatcacttataagtatataccatcatgattgtcaattaataataatactagttttaaaaaatgtttgacttgaaatgtgatcttagactccacttgggcctctctgggtctctctcttctcccccaccctgggctctctcttttctaggctttcctgggtctaggctttcttttggacctacctcttgggtttcctgctcagaaaatgtcccttctagtgttcccagtttctacagggtgaggggtgagggtgggtctttcccacttggttctcccgacctctagacacttagatctgatgagatgtgtgggctgcttctcggagcctcttacatccctaaaactaaagcaagctacagtgagcaaactgaaaatgctttctgtacattttatgtcaatgctatgctagccagaggagtgagtgagggaagagagagacggcatggaaaccaagtacatcacacacactcagacacacacacgcacacataacctcgaaaacctcttgtatgcaattgacatatccacaaccccagacagacacagtcacatgcaaactcttcagacatgcaaccacacacacacccacacaaaccttcagaaatgcagctccatgcatgcagtcatacaatccctacacacacacacttcccacattcatgtacaccctcaggcacacaaccacacaccttcagaaatgcaattccaggcacacagttgtacaattctgcacacagacacactcacacatacacttgccacattcatgtacaccctcaggcacgcaaccacccacaccttcagaaatgcaattccaggcatgcagtcatacaattctgcacacacacatacacattcatgtacaccctcaggcacacaaccacacacaccttcgtggctctgcacaactacccttcatgaattaaatcttacagaggcagtgacagccatacaattcctacctacacacagaaacacacacacacacactctttagggcacaaaacacaaacttcagactttcaaaatcatcctcacatttaaacattcagctccacacacctgttcaggacggcgatcccactcacaaattcagtctctctctctctctgtcacacacacacacacacacacacacacacacacacacacacacacactaatgcccagaccctctgcagcctcagccacatcagatacatctgaaattggtgaaataagccctctgacagagaaggcaaccgagccctataaatgcacaaggcatcgggctcggtgctggaaacgtgcctgtgtgcggaggccacgggttggggaggtggggagacgggcagggagacccggggataactaaggggataggaaactcaccagaacgaccaggagaaaagcggtggcaacggctctaaggggcaagcaggagctcagagacaaagggcggcggagaagtggggacgtgggcgcagggagcgccccacacgcctgaccccagcgcctcggatcccccacctgcccgcaacctccgcgccgcagccacaccgagtccccgcgccgagccgcggagtccccactcaccggcgtccggagcggcgggggcggcctgcccgcgcctcggcctgcgcgctgcgcccggatgcaggagccggagcccggcgaagcgcccggccggggccgcggggacccgccagggactgtgcagcaccggcgcggggaccggaccgtggaggcaccggcgcggagccgggacgcgctatgctgcgggagggatccgggccggccctgcgctcacgtgggtgtgggggcaccgagcggccgggggagggggcgggatcccctccgcgatgccctccgcctcccccgcgcccagcccaggctccgcagccgtgtgggagaagggggacagcgtgcttgcgaagggagggggactgggggtgggcgggggtgagtggcctctccggcatccagcccccgccccctgctcggagccgcgcctccgcgcccccgccccctaaaccgcctccggagccctcggaggccccagcatccctggcggagcgcggggaacaggccctggcaccgcgggacccgctccagcagcctcggcggaggcctggggaaggcgcggctctagtgtcccagtaacaacagccagggagagggctccgctgcccccttctccttgcgggtgcaccttccggccttggccacttggctgctgtgtgcccttgggccaactcctctccctctctgagcctggcttcctccgctaaacaaggaagatggcttggccgaccccacagaaaattaaagctgagaaaattaaagcgcgtgaggctggaaatgctccgtgccagcgcgaagcactgggcaaatgggagatggataatgtcgttcctattgtaattaatattattctttgctgtctttagagcacaccaggcaaggtgcactcgacttttcttctcgaaaggcaatgacttggttgcttcccacatcttctgcctctcctgagagctaatgccatttaaagatctgagcatcaggtctgtcgtatgaataaaaactcagtgcaggctgggcacggtggctcacgcctgtaatcccagcactttgggaggccgaggcgggaggatcacttgaacacaggaggcggaggttgcagtgagccgagatcgcaccactgctctccagcctgggtgacagagcgagactccgtcaaaaaaaaaaaaaaaaagtcagtgcacgttcaatgttttttattattgttgttgttgttgatgaagtgttgatggcgacctcctgaactaggcaggctcttttattaatacttatatttaatctacacactcctataaagtatatatcacttcctctattttcagggcggggacaggtgctcagaaaggttcaataacttgtccaaggtcacacagccaggaaacagatgccccaattctaattctttgcatgcatcgccctggctctgcttctttgcaacaactcctagataggtgattctcaaacttagctgtattttaaaactacctggagaggttttaaaaattctgaagccagcctgacatagtggcccatgcatgtaatcccagcacattgggacgccaaggagagaggatcacttgagcccaggagttcaagatcagcctgggcaacatagcaagactctgtctctatttaaaaaaaaaaaatcaaaaaattagctgggcacacacctgtagtcccagttactcaggaggctgaggcaggagggtcacttgagcttaggaatttgaggttacagtgagctatgattgtgccactgcacttcagcctggacaacagagcaagaccttgtctaaaaaaaaaaaaaggaaagaaaagaaaagatatctgatgcccaagccacaccctataccaagcacatcagcatacctggaagtgggacccaggcatcagtatatttgaatgctccccaatgtatggctaaggctgaatctctgtcctagatgtcagattcccctggaccacattggcaacccctctctgcagccttctcactccgctgcttcagtcactcactgtgcttagacgattctgcatccttcttgaacctagagctgcccctgaactcctgcctcttacggtcattcactccacaaatacttactgtgcacttggatgtgctagaggctggagactcagcagcgaagacaacagagccctcggtctgtcacgcaaaataataagtaaataaaatagcagttgttccctggcaattggccttgcaagccctttacacccgtaacaatcagggaggatcccaaagaaaccataactcaagcctaagcatgagaaaaacatcagactaatttcaatagagaggcatccgataatctacctgcgcagtcctcttcaaaacagtcattaaaaattaaggaacatgtggagcagggtttggtggcaggtgcctgtagtcccagatactcaggaggctgatgcaggaggaccgcttgagtccaagaggttgaatctgggaccgcttgagtccaagaggttgagtttgcagtgaactatgattgtgccacagcactccagcctgggcaacagagcgagaccctgtctctaaaaaaaaaaataaaatttaaaaatgagaaaacaaggaatgtctgagaaactgtcacagccgagaggagtctaagaagatatgacaacaaaacgtaatgtgagatcctagaaaagaaaaaggatataaggaaaaaattaggaaatctgaatagagtatgggctttcgctaataataatgtatccatattggccgggcatggtggcacacacctgtaatcccagccctttggaaggccgaggtgggcaaatcactagaggtcaggagttcgagaccagcctggccaacctggtgaaaccccgtatctactaaaaatataaaattagccaggcatggtggcgggtgcctgtaatcccagctactcgggaggctgaggcaagagaattacttgaaccccggaggcagagtttgcagtgagccaaggtcgtgccactgcactccagcctgggcaacagggtaagactctgtttcaaaaaaagttatctgtaacaataacattttgttaataatgtatcaatataataatatatcaatattacaatatggtaattatacaaatgtgccatactaatgaaatatattaataacaagtgaaactaagtcaagggagcatatgggagctgtctgtactatcttttcattttttatgtaaatctaaaactgttctcagaaactgtgtcttaatttaaaaagatcctgggagatcccaaagagcttttctttatataggttatagctattgatctttacagtatcagaaattaaaactgaaaaagtgtttcaacatttattcattttaacataacaaaaataaacctactacatgttaacataaaatagcatatttttacgaaaaataactgtattttccaaaacaagaacaaaaaaagaagagtgacattgttttacactttttcaaattgctttaatggctaccttcatcaaaaggaaacggaatttttatacagttgattttcattattcacggattctgtatttgcaaagtcactcactcactaacatgtatttgtgaccccaaaattaatacttgcggagattctgacatttttctgggtcatttgcagagagattaacattttgagctgcacggcgtgaacatttgtagctgaggtgcaaaagaaccatgctctgttatcttgtttcagctcatacagtgaacaagcatcctatttgtggcctgtttagtgccatacttttctaactttcatgttttttgttgatttcgctgtttaaaatggtcctgagcactttgctgaagtgctgtctagcgtttctaagctgaagtgctcagtgtgtttctaagctctagaaggttgtggggtagctgggtgtggtggctcacacttgcaatcccagccgcgctttgggaagccaagacaggaggattacttgagcccaggagtttgagaccagcctgagcaacatattgagactcccccatctccacaaaaaattttaaaatgagccaggtatggggggcgtgcctgtggtcccagctactcaggaggctgaggcgggaggatcgcttgagcctggaaggttgatgctgcagtgacctatgatcgtaccactgcactcctgcctgggcgacagagcaagattttagctctaaaaaacaacaacaacaagaacaacaacaccaaaaaaaaaaaaaaaaaaaaaaaggctgtaaggctgtaaggctgtgacgtgccttacagagacaatatgtatgttaggtaagctatgctcagacataacttctagtactgttggccatgagctcaatgttaatgaatcagcaacatatattaaatatggagtctttaaacaaaaacacaaataaaacaaagtatatatcagttgacaaaaatgttgtgaccaggtgcttacagaaactaaatcttgtacttccccctggaagcagtgatttagtatttgctacttcagtgttcaaagcaactttatagggctgggtgcggtggctcatgcctgtaatctcagcagtttgggaggctgaggcgggcggatcatctgaggtcaggagtttgagaccagcctgacaaatatggagaaaccccgtctctactaaaaatacaaaattagccaggtatggtggcgcttgcctgtagtcacagctacttgggaggctgaggcaggagaatcacttgaacccaggaggcggaagttgcagtgagctgacatcgcaccattgtggtgagccgagatcgtgccattgccctccagcctgggcaacaagagcaaagctccatctctaaaataaaaaacaaaaaaaaaagcaacttcatagaatataactaccatgaatcatgaaaatcaactgtatctgcttctgcattgaatctgtaatggtatattgttttggttgaaatacatgaaaaaaattcagtcttacacagacaggcagttgaaaagggaagattattttaatcagcttttcaggtaactgtgtctattctttgagacgacaccaaaatgctacatattttagtttcttcaagaacagttgcaatgcagaattggaaaccctgtccgtgaattcttgcattctgttaatattaaaatccattaagctcgtcttttaaccatgcatgattttgaaacctcatgcattcgtcatttgaaaaatgttagctcactagttacagatctgctacatattaacacatttcattatgcaatagcaaaaagtcatgtttgttaatatcatcactgatctcatggaaagttttaaagtgttgggaagttctcagagtcgtgaatacaaatttttaaaaattataattttcactcaaaagtgcaatttttttgtttgtttgtttagatagagtctcgctctgctgcccaggctggagtgcagtggtgtgatctcggctcactgcaacctccacctcctgggttcaaacaattctcctgcctcagcctcctgagtagctgggattacaggtgcgtgccaccatgcctggctaatttttgtatttttagtagagacggggtttcaccgtgttggccaggctggtcttgaactcctgaccttaggtgatccgcccgcatcggcctcccgaagtgctgggattacaggcgtaaaaagtgcaaattttatcattgacaataatgactgtgaatcattttccttgaagtgacagatatatttctttcatttttgcaaaaatgtctgtcaaacctcctttgatgtggtttggatgttctgtcccctccaaatctcatgttgaaatgtgacctccagtgttggaggcaggcctagtaggaggtgttttggtcacgggggtggattttttgtgaatggcttgctgccattctcctggtaatgagtgagttctcactctatgagttcatgggaaagctcgctgtttaaaagagcctgacacctcctccctctctctttcttgctgtctctcaccatttgacatttctgctccccttcaccttccaccatgactggaagctgcctgaggccctcaccagaaacagatgccagtgccatgcttcctgtacagcctgcagaactgtgagccaaaataaagcacttttctttataaattacccagtctcagatattcctttatagcaatgcaaacagtctggccgggcacttggctcacgcctataatcccagcctttgggaggccaaggagggaggatcgtttgaggccaggagtttgaggccagcctgtccaatatggcaaaaatccatctctacttacaatacaaaaattagctgggcatggtggtgcataccactcagctactcaggaggctgaggcagaagaattgtttgaacccaggaggtggaggttgcagtgagccgagatcacaccactgcactccagcctgggcagcagagcgagactctgtctcaaaaaagaaaaaaaacaacaacagacacacacacagactaatacaccatgtcagaatagctgaggtttgtctgtctaaaaatggaattccatgaaaaaaagtagctggttcagcttgcaattcaaacactcacacaagcagtaattttttttttttttgtcttggagacagctaccatgatacttctgtgtgtagaaaaattttttatccatacttcccgttgcatcacacagaatattaaaaagacatatactcaagagtcaagatttaataaaatgggccagacacagtggctcatgcctgtaatcccagcactttgggaggccaaagtgagtggatcacctaaggtcagaagttcaagaccagcctggccaacatggtgaaaccccgtctctactaaaaatacaaaaaaaaattagcccagcatggtggggggtgcctgtaatctcagctactatggaggctgagggaggagaattgcttgaacctgggaggtagaggtttgcagtgagccgagattgcaccattgcactccagcctgggcggcaagagtgaactccgtctcaaaaaaaaaaaaaggatttaataaaatgaataattgtattgctttatcaagtacaagcctaaatgaaactggctttttttttttttaagacagggtctccctctgtcacccaggctggagtgcagtggtgcaatcatagctcactgtagccttgacatcctgggctcaagtgatgcttccacctcagcctcttgagtagctgggaatacaggtgtgcgccaccaggtctggctaatttttcctctacttttttgtagagactgggtctcaaactcctggactcaagtgatcctcctgcctcggcctcccaaggtgctggaattacaggcatgagtcactgtacctggcctgaaactggcttttgttaaaaccatgagtgtgtggcaatgaagaatataatgacccctagtacagtttggtgctgctgcgttgattcacgcttacatgatagacactgttactcgcccttacttttgctccatgagtgcatagactaacacagtgaaaaaaggcaaataatatcttagaatgattattaaaatcattttgaccttgcagaccccctgaatggtctcaaggctgccacacctggggatttgcaggctacactttgcaaaccattgtcagatggtgataagtcctatggggaaaaaacaataatgagggctggatgcggtggctcacacctgtaatcccagcactttgggaagccgaggtgagcggatcatgaggtcaggagatcgagaccagcctgaccaacatggcgaaataccgtctctactgaaaatacaaaaattagccaggcatggtggtgcacacctgtaatcccagctactcgggaggctgaggcagaagaattgcttgaaccccaggaggcagaggttgcagtgagctgagatcgcaccactgcactccagcctgagcgacagagcaagactctgtctcggaaaaaaaaaattttttttaattaaaaataataattataatcaggaaaagaatatatggagggtgaggagagagtcacagtcttcattaagcagttagtgaatgtccgagtgcgcaggtgatatttgagcaaagacgcaaagcagataaggaagtgagcagggaggatgactacaggaagagcaatccaggtagcgggaacagcaaatgcagagactctgagcagaatatgcctgtgctgtttgaagcccagcaagtacatcatgagtctcccccagtatgttccacagcagctcagactcaaaccatgcccagctagaaagcatttgcaaagcaactcagggagcctagtccagcagagcctgccttttcggttttggcttttttatttgttttggtttggttttttgagacaggatctgactctgttgcccaggctgaagtgcagtagggcaatcatagtttactgcagctttgaattcctgggctcaagcaatcctactgcctcagcctcccaagtagctgagaccacagatgtatactaacaatacaaaaatcagccgggcgtggtggtgcacacctgtaatcccaactactcaggaggctgaggcaggagaatttcttgaacccaggaggtggagagccttctggcatattccccaagtctgctgttagcttccctatcttagtgcacctgaagggaaaggaatgtgtttattaaggcccactgttttactggggcccgttgtatgagggtgaagtttggcagttaaccaagagactttctccccacctccctctgtgccccagctgtcttatttgtgttttatggtctgctctttctgtcttcttgtagttagaagagaagtgatctccctaaaatgcatgaggctagaaaaggagctggaacttaaagtagctgtgtttgtccaagatgatggtgcttctgctctgtgaaaccttatgttcagaaaacaaataacccaattagaaaatgggcaaaggacttgaacagacatttcttaaaagaagacatacaaaatggccaacaggttcatgaaagaaaaaatgctgaatataattaatcatcagggaaatgcaaattaaaaccacaatgagatatcacctaatacctgtcagaatatacaccatagaatactactcagccattaaaaaagaatgaaatcatgtctgttgcaacaacttggatggagctggaggccattatcttaagcgaaataactcagaaacagaaagtcaaatactagctggtgtggtggctcacgcctgtaatcccaacactgtgggaggctgaggagggaggatcccttgagctcaggagtaggagacgaccagcctgggcagcatagcaagatcccatctctacaaaaaataataataattacctgggtgtggtggtgcacacctgtagtcctagctactcaggaggcagaggtgggaggatcacttgaactgaggagctcaaggctgcagtgagccatgatcgtgccactgcactccagcctgagcaacagagcaagatcctgtctttaaaaaaagaaggaagaaagtcaaataccaaatgttctcacaaatgggagctaaacgatgggtacccatggttttacagacaccggcaactccaaaaggtgggagggtcgggggctgagggatgagacactacctgttaggtacaatacacattatttgggtgatggctacactaaaagcctagactttaagagtattcaatatatccatgtatcaaaactgcactgaacccccaaaatctattttaaaaaaaattttttaaggaggagtttcactctggttgcccaggctggagtgcaatggcgtgatctcggctcactgcaacctccacctcctgggttcaagcaattctcctgcctcggcctcccgagtagcttgaattacaggcatgcaccaccacgcctggctaattttgtatttttagtagagacggggtttctccatgttggtcaggctggtcttgaactcccgacctcaggtgatccgcccacctcggcctcccaaagtgtggaattacaggcgtgagccaccgtgcccggccaaaaattttttttaaagaaaaaagataagtggtcaggggaattcggagaaaagacaacccatgtgctctgttggtgggaatgtaaattagtacagccattataaaaaacaaaacaaaacaaaaacagtatggaggctgggcacagtggctcatgcctgtaatttcaaaactttgggaggctgagtggggtggcggggggtggggtgtggatcacctgaggttaggagttcgagaccagcctggccaacatggtgaaaacccatctgtactaaacatacaaaaatcagcgtggcgtggtggtgcgcacctgtaatcccagctactggggaggctgaagcaggagattcacttgaacccaggaggtggaggttgcagtgagccaagttcatgccactgcactccagcctgggcaacagagcaagactctgtctcgaaaaaatagaagaacagtgtggaggtttctcaaaaagttaaaatagaattaccatatgatcctgcagtcccactactggatatgtatatctaaaggaaatgaaatcagtgtctcaaagagatatctgcacccccatgctcattgcaatgttattcacaacagtcaagatatggaagcaacctaagtgtccaccgagaaatggatttttaaatgtactatgctatgcagttgtaagaaaagaaaatcctgtcatttatgacaacatgaacaaatgacaggatttccttttgatgaacctggagaacattatgttgggtgaaataagccaggcactgaaagacaaataccatgatctcacttacatgtggaatctaaaaacaattgaactcataacagcagagaataaaatgatgattaccagagactcaagttggaggattggggagatgttggtcaaaggataccgaatttcagttggtaaagaggaataattttggctgggtgcagtggctcatgcctgtagtcccagcactttgggaagccgaggcaggcggatcacctgaggtcaggagttcgagaccagcctgaccaacgtggtgaaaccctgtctctagtaaaaatacaaaattagccaggagtggtggcgcacacctataatcgcagctacttaggaagctgaggcaggagaatctcttgaacttgggaggcggaggttgcagtgagccaagatcataccactgcactccagcctgggcaacaagagtgagactctgtctcaaaaaacaaaacaaaacaaaaaaaaaaaaaaacgaataatttcaagagatctgttgtacaacatggtgactctagttaataacaatacagtgtattctagacaaatgctaagagagtagattgtaaatgttcttaccataaaagtgaactttggaaggcaatgcacatattgatgagctagatttagccattccacaatgtgtgtgtgtatatttcaaaacatcatgctgtacacaacaaatacacacaattttatctgtcatttaaataaaattttaaaataaaaatatttttaaaacacaccttaaaaaacataatgctgagtgagagaagccggatacaaaaggccacataagtgtatataattctatttatatgaaatgtccagaataggcaaatcctatcctagatttggaaagcagattcgtggttgccaggggctgcaggcgggagaaatgatgagtgatgctaaagggtatagacttccttttggggcgattgaaatgttctggacctagatagaggtgatagttacaggacactgggaattgtactctttaaaagggttaatttgactaggtgcggtggctcatacctgtaatcccagcactttgggaggccaaggtggatagatcactagaggtcaggagttcaagccccctggccagcatggtgaaaccccatctctaccaaaaatacaaaaattagctgggtgtggtgatgcgcacatgtaatcccagctactcaggaggctgaggaagagaattgcttgaacccgggaggaggatgttgcagtgagccgagatatcgccactgcactccagcctgggtgacagagggagactctgtgtcaaaaaaaaaaaaaaagacaattttacattacacaaatttcacttcaataaaacaaaagtaaaggagtaccaaaaaaacctcggtattaaagagaaacaatatttcaatgaaatctttttagaaatcaaaatgaatgcaaaaaaatccacaatgaacaaatagatcaacatgttaaatcaagacaggaccaaagttcctacttttccttctgcttttttcttttttttttttttctagagggagtcttgctctgtcacgcagtggcgtgatcttggctcactgcaatctccgcctcccgggttctagtgattctcctgcctcagcctcccgagtagctgggattacaggtgcctaccaccacgtccagctaatttttgtatttttagtagagacggggtttcaccatgttgggcaggctggtcttgaactcctgaccttaggtgatccacccgcctcagcctcccaaagtgctgggattacaggcgtgagccaacgcgcccagtgccttctgcttttcaggctcctgtgtggctcagttcagcactcttactgattctatcttgaacattctgctatttgggttaaccatggattgtttgcattaatttcatgagttgtttttaattattgacattggagtattatttagcttagtcgccggttttttggtgctacctgatattttgtatgtgggactgactggtatctcaacctcactgtggccttgtgagtctcttgctctctcaacagtaaaggctgccagctcccttttacagataagaagggtctcaaagaggttaagcagcaggcctcagaattaataaagagcagggtcacggccgggtgtagtggctcacgcctgtaatcccagcactttgggaggccgaggcaggcagacaggtggtgcgcacctgtaatcccagctactcaggaggctgaggcaggagaatcgcttgaactcaggaggtggagtttgcagtgagccaagatcatgccactgcactccatcttgggctacagagcaagactctgtctcaaaaaaaaaaaaaatgagcagggttagattggagcccacatctgtctggctcaaacctccagccaccccaggtccactctgaccaaaggctccaactctggccctagcattaggagggcagggcagtgcagacggagcaccccgggctgtcccagacgactgccccagctgcaaggtggagcttgaacacgagctgagccaagaagagtctgagaccgaggaattgaggctaattcctctgtgggaaacgctccctattaattaattagggcagagctagcctgaggcatccccgcagcccccagagtcattaaaggagagggagtctcattatcggctaacagcttccccaccgttcccagggccccagagggagcagaggaggtgggaggaggaccaggtctccccgtcctgatcccctgtctttcattaccagagtggcctgatatgcaagcgaattgtctaaaagtagaatttcaggggaggtaaaaaagggaaagtcagaactgagggattcaggataccccctcccaaattcagtctgcacttatatttatataaaatacccagcacaggtaaatccataaagatagacatccaattagtggttgcccagggctggagtcggggggcaatggtgagtgactgctgatgatgggtagagggtttccttctgggggggtgaaagctgtagtcaaacttgataatgctgacggtagcacagcactgcaaatgtactaaagtcactgaaccgtcaactttcaaatggtcaattttatgttatgtgtattttataatttaaaaaaatcaatctccttctcattcctggctatttcatcaacatttattaacatgtgctttctgcccggcattgtactgggaggggaggcctggtgccaccctggcaactctgtcttagtgagagatgtcatggtcaacaactgtttgaggcctgcatgcaaggggtaaaggaatttaccaagacaagagtgagttttaaaaggcagatgtattaaagaaaggaggacatgcattgcaaggatgcaatgggtaagacagcagaaggaaggttgtctgctgtctgaaaagagtcaggggctggagggaaagttttataaggtggtgctccttcagctgagtgcttgcagacaggatggttgggtgcaggtgggcagtgagctgagtgcttgcaaacaagatgcttgtgtgcagatgggctgtgagctgaaagcttgtagataagatgcttgggtgcaggtgggctgtgagctgagcacttgcaacagaatgcttgggtgcaggcgggctgtgagctgagcactagaagctagcgggccttttgcagttgaccccatttctcagaacatttgcttctctcaaccccagataagcccattctttaagttttcttttaactccttagggctccacacgaaatgatgctggagaccttcaagatggcctccagggatgttctccatctgtcctccccttgttctgtgtccaggttcatggatcaaaccaacaagaagccttgtcctctgtcttctggttggcttcaagcaatgggaagcccttacaggaggcaagagggatgaaagagggtgaggccagagtatttatttcctggggtgcctccctgcatcccccctgcagattggccctagactgcagagcacaaggtcctggctggcagccccctctaggttccagtagtaacagctccctcccctctctgcatctgcccaggagtggtaataacccccagatgctgactgctccacgtaactgcatggattctgcaatcctgtatggtttctttaccccctaccacaccttgacccaactcccctcaaactgcccagtctaccctccatctttctccaggggttagagagaatgcaaccctccgacttgctctgcaccccagaaggtggatttttgtggctatcaatgggctgcctgccttggagaatctggtggggttggctttgtgaaagtaaaataaatttggggaccccaaaatcactaagccaaagggaaaagtcaagctgggagctgcttagggcaaacccccttgcctttctattgcttaaaaagtttgggtgcgccatcctgagtttctttctgttcagacttccctcttgatatgtatttagaagaggaagaagaaaaataagcaggcaggtagtaaagtataatcacaatgggatagtattcagccacaaaaaaaataaggaaatcctgccatttgcaaccacatggatgaactcggagaacatgatattacaggaaataagccagatacagaaagacaaacactgcatgatctcactcatatgtggaatcctaaaatgttgaactcatagaaaaagagagtagagtggccgagtgtggtggctcacacctgtaatcccagcactttgggaggccaagacgggtggatcacctgaggtcaggagttcgagaccagcctggccaatatggcgaaactccgtctctactaataatacaaaaattagctaggcatggtggcacatgcctgtaatcccagctacttgggaggctgaggtaggagaattgcttgaaccctggaggtggaggttgcagtgagccgagatcataccacagcactccagcctgggcaacaagagtgaaactccatctccaaaaaaaaaaaaaaaaaagaaagaaagaaagaaagaaagaaaagggaagggaagggaagggaagggaagaaaaagaaagtagaacagtggttaccataccatagccttgggtggttgaggagatgttggtcaaaggatgccaaatttcagttagataggagaaaaaagttcaagagatctattgtacagcatggttaccctattctcaaaaaatgcgaagcgaacagatgcaaatgcttcaccacaaaaatgataactatatgagggaatgcatatgttaattgactagatttagtcattccacaatatatatatacgataaaacgttatgctatacatgatatacagatacaatttgtgtcaatttttaaatttttaattaaaacatatattaaaagtccagatccccaatgttggcatcaatagttgcttaagtgtgaacaaaaatacaatttgacattaaaaaagtaaagtatagtagtagaagtgtcctcagttgacctcatagaagaagagagatggtagatcactggtagatccaggagctaggttaccccggaaaagaacattagacagcaatatcattgatgaagaagagagagggaaggaaaagggggtgtccattttaaagatcttaaagattttttttactatcaaggtaatttatgttcattgcagaaaatctgaaaaatgcagaaagaatagaaggaaacacggtagaaaaaattcaaccaaatcctatttataatcaacactaaattgttggtgaactgctttccaggtggagatatttgtcttacttcaaaattagaatcatgcctacctgctacatgaataaaccttgaggacagtgggctaagtgaaagaagccaaatgcaaaaggacaagtattgtatgattcaacttatatgagatacatagaatagccaaagcaaagacaaaaagtagaacattggttaccagggactgcagagttgcaaggagaatggggagttattgtttgatgggcactgagtttcatctggggaagacggatgaaggtaatggttgcacaacaatgggattgtacttaatgccactgaactgtacacttagaaatatatacattagaatcctgccaattggtcagtttgttctcctcctcctccttctccttccccttctttctttcctcctcctcctcctccctctcctcctcctctttcttcttcttcttcttcttcttcttcttcttgttcttcttcctcttcttcttcttcctctcattgtaccttaagccgttacttctatctgacatgattttgatggtttattttagtttttcatttttcccactgactgacaagctccaggagagaagagaaacttcatcttactgctccactctcctggctcttagcctggtgcctgacacagagcagatgctcaataaacatttgccaagtcactcgatcaatcaatcaatcaagccattaggaaagaaagattttctagtgggcccccaagtctactctccatccttctccaggaggtagaaaggatgcacccctccaacttgctctgcaccccaggtggtggatttttgtggatatcagtgggctcccttccttggaggatctggtggggtgtgaaaggaaaataaatcttgggacccagaaatcactaagccaaagggaaaagtcaagctgggaactacttagggcaaacatgcctccgattctattcctaaaaaagatagctactaagataaaagagctacatatctccctcacaaggaatttccttgcaggcaaaggacagacaaaactcagtcatccctctgctcactgagataaatgcatatctgcttgcctcctttggaaaggcgaatcagaaactcaaaagaatgcaaccatttgtctcttacctacctatgacctggaagcctcctccctactttgagttgttccacctttctggatggaaccaatgtacttcttacagatatttactgatgtctcgtgtctctctaaaatgtataaaaccaagctgtgcccagaccaccttgagggcatgtcatcaggacctcctgaggatgtatcacaggcactcatttttaactttggcaaaataaacttcctaaattgactgataattgtctcagatatttggggttcatagcttaaaagaatccccagaaaatggcagcattggggcagattaaggcgggaaaccaggatattagaagatgagcttcagacagccaagagagcaagtggctgcttctcccttgctctgctatttgagatgcttccccggtgcacctacctgtgataggcaatgccacacagagacaggccaggaataggcaggggaccctcagctaaaggagcagaagccattatattagttttctagggctgccataacaaatcacagcaaattgtctggttgaaagccacaggaatttattctcacacagtcttggaaggcagaagtctgaaatcaaggtgttggtagggctgtgctccttccaaagctctggaggagaatcttcccttgcctcattctagtttctcatagttgccaagaatcctgggcatttcttggcttgtatatcctctactccaatcttcatgtctttttttttaattgacaagtaaaaattgcatatatttatgatgtacaatatgatgtttgtgtgtgtgtgtgtgtgtatgcactatggaatgaataaatcaagctattaacatatgcatgtaaactaaaaataaaattctatgccctaccaaccatctgaatggacccctcttggccaagggcattccaaaattaacctgaaaaactagttcaggccatgatagaaagacggaatcagacatgcctcattaagctctcttccctttggaattcaggcatagctggccagcattaacattaaaacagagatcttggccaggtgtgatggctcacccctgtaatcccagcactttgggaggccaaggtgggcagatcacttgagggtgggagttcaagaccagcctggccaacatggtgaaaccctgtctcttctaaaaatacaaaaattagccagtcattgtagcacatgcctgtaatcccagatattcaggtggctgaggcaggagaatcacttgaacccagcagggagaggttgcagcgagccaagatcatgccactgtactccagcctgggcaacagagtgagactctgtctcaaaaaacaaacaaaacaaaaaaataaacaacaacaacaaaaaaagcagagatcttaagactttttgtagcaataagacaccaaattccaaattactttagtatagcatcacatgacagatagcaggtcctgaaagaaattgagatattttactctaaaatgtatttctttgacatattttgaaatggctctgcaaagctgtctcttgtgaggaaaatctacactttttggagcatcccttctcctttccaggtcttctccctgatccaggagagaattaactgggtctagaacctttttaagtctgataagaaacatttatttatttatttatttatttatttatttatttatttttaatggagtcttgctctgtcacccaggctggagtgcagtggcactatctcggctcactgcagcctccgcctcctgggttcacgccattctcctgcctcagcctcccgagtagctgggactacaggtgcccgccaccacacctggctaatttttttgtatttttagtagagacggggtttcatcgtgttagccatgatggtctcaatctcctgacctcgtgattcacctgcctcagcctcccaaagtgctgggattacaggcgtgagccaccatgcccggccaagaaacatttataatctactctctctgaagcctgctacctggtggcttcatctgcaaaataagaaccttggtctccacaaccccttattttaacccagacactctcttctatggattccaggtctttatataaactctttcaaccaattgccaattggaaaatctttgaatccacctatgacctggaagccccccaactcctacccacctcaagttgtcccgtctttctgagtcgacccaatgtacacttaacatgtattgactgatgtctcttgtctgcctaaaatgtataaaaccaagctgtagcttaaagaccttgggcacatgtcatcaggacctctcctgtgtcacaggcctgtcaataaccttggcaaaataaacttctaaactgattgagactcatctgagatacttcttggtttacatgcattatctcacatacttatcatttttttgtggtgagaacactgcaaatctctttcagcaattttcaagtacacacagtctccaacttacaatggttcaacttgtgatttttttactctaccgtggggcaaagtagaaaccatcctttgagtagccacacaatcattcttgttttcaccttcaatacaatagtcaataaattacatgagatagtcaacattttattataaaataggtttttttgttttttattattatactttaagttttagggtacatgtgcacaacatgctggtttgttacatatatatacatgtgctatgttggtgtgctgcacccagtaactcgtcatttaacattaggtatgtctcctaatgctatctcttccccctcccccccaccccacaacaggccccggtgtgtgaggttccccttcctgtgtccatgtgggaattgaacaatgaaaaataggttttgtgttagatgattttgctcaactctaggctaatgtaagtgttctgcgcatgtttaaggtagatgaggctaagctatggtgttcagtaggttatatgtattaaatgcattttgacttatgatattttcaacttatgatgggtttatcaggatgtaaccttatcataagttgaggaaaatctctatgcaatatactgttattaactatagttgccacgatgtataacagatctgttgaacttattcttctcttctagctaaaattttgtgtcttctgaccaacatctccccaattgcccccaatcctagcctctggcaaccaccattttattctgtttctatcagtttgtcttttttaccttccacatataagtgagaagatgcagtatttgtctttgtgcctgggttatttcatttagcctaatgtcctccagcttcatccaggttgttgcaaatgacaggatttccttctttctaatggctaaatagtattctattgtgtatatgtgccacattttctttatccaaccggatggactcaggttcattccatatcttggctactgtgaacagtgctgcaataaacatggggagtgcaaatatctccttgacatactgatgccatttcctttgctgatcatcatgttttcacacggcattgtccccatgcatctctgttctcttatacacatggccaacttgtcataaggacaccagtaggatccaacccactccagtaccaccttaccttacttacatctgcaatgaccctaattccaaataacatcacattcacatgtaccacaggggaggactccaacatatctttttctgagaggcacaattcaacccataacagtagataagccctttcaacagttcttcttcccacctaatttgggttatcccacaaacagaaaagatgtttgaaggttgaacagctagaacaggaatgttcatagcagaagcagaagaaagtccttggttggtccacacacatggagtatgttttagcatgacagagcagccatcattatgtcactcagcgaacaaatattaagggtctactttgttccagtttgttcccaaactgggctgggaacttagttattcagtaataactaagacaaatgagatgcccaccaaggagctgacattctagagagggaaggaaaagaattacaatctgacaagagctacgaggggaggagggatggcgtatagcccggtggtgtgagacctcaaaccgagtggtcagagaagagttctttaagagataatatttgaacagagacccaaagcaagaaagggagaaagccatataaaaatgcagaataagaacatttcagagaggggaaaaacaaatgcaaagactatgagaataaacacggatggtgagcacatcatgactgatcctttatgatctttggacagagaggtgggagatggaaggaaaggtgggatggggccagatggtaagaaattgggattctgtagattctggtaaggaacttggatgccattctaaacctgaggttcacttcactgaacccacctattggttgtaaagccacagtcttcctaaccttcttattttcttgagacagggtctcactctgtcactcaggctggagtgcagtggcacaatcagggctcattgcagcctcgacctcccttggctcaggtgattctccttcttcagcctccagagtagctggaaccacaggcacacaccataatgccctgctaatttttccattttttgtagagccagggtttaccatgttgcccagattggtctcaaactcctgggcttaagcaattcatccgcctcagtctcccaaagtgctgggattacagtagtgagccaccacacctggccctaacctaactattaatacccaaattcactaatgagaaaaagattttccaagtaaaaagtgaggaatgagaagtgaatggagaatgaaaacctgatgcacacgctatttctcttttattttattttattattgttttattttgttttgagacaggatcttgctgtgttacccaggctggagtgcagtggtgcgatcatagctcactgcagcctccatctcctgggctcaagcgatcctcccaccccagcctcttgagtagctcagattccagatatgcaccaccacatccagctgttttttgttttgtttggtttggtttgggttgggttttttgttttgttttgttttttgtttttaagaaacagggtcttgctatgttgcccaggctagcctcaaactcctggcttcaagcaatcctcctacctcagcctcccaaagtgctggaattataggcatgagccaccatgcctggcttggatttcttcagagtgagcaagtgaaagagcaagcaagagagagcagaacagaagccatgatcgctttgtaacctaatctcagaagcagcatctatcatgtttgccataggctgttggttacaagtgacacatcaggtccagcccacactcaagggattacacagggcatgaggatcaggaggtgaggaccattcagggccatctgaagatgcctaacccagctgaaaaagaaatccatcatatttgaggggtggatggcggacaaccagctagtaaagaacacagagtagaggtgaaaaagaaaacatgtgaaagagcacaggggaggggattcaagtcacagagggctgacaatttcaaagctaccaggaggtcaagttgagcaggatagaaaagaaactggaatttgtccattgcaggaagacgttgatgatggatgcctgagccattatttttgtttgtttgtttgtttgtttgtttgttttcggtttgtgtttttcatttttgtctttttgttttttgtgggatgttgttgttgttgttgttgttattttgttttttgtaatagagtctctgtctcacccaggctagagcacagtggcacaatctcagctcactgcaacctccgccccccgggttcaagcgattctcatgactcagcctcttgagtagctgggattacaggcatgtgccaccacgcccagctaatttttgcatttttgtacagatggggtttcaccatgttggccaggctggtctcgaactcctggcctcaactgatctgcctacctcagcctcccaaagtgctgggattacaggcataagccaccgtgcctggcctgcctgagtcattttgagggactgaccaggggtacagccatagacacaggtccttgtcactcactgaccagcaaggtcactgcctttgcaggagatgacagggaagaaccaggaagcacctcctctcccagcctggggcttcccaccatctcctgacacctccaccagaaaagcgacctcatttctcaaagacaaaacagattctaggtcatatccccctggaatgagagaccaattgatgtgattatctccaagagaaagaggggcacctactaaaagtagaacctggtgtcccagaagggaagacatcggggaacctaaaaaggggtctctgataattacctgccaagatttcacagcgaagggcatctccatgtaatgccaaaaaaaaaaaaaagaaagaaaagaaaagaaaaaaggctagaagttttagaaggtgctccttcttcatccattctgcaatttcactcgatttcgcccaaaagcagaattctgctccctacattgcatgaatcagtatatagaacaggtggccccagcaaagttgcaaaaaggaatttctataaagtgttctttattataaaaatcaagagagctgccaggtgtggtggttcatgcctgtaatcctagcactttgggaggccaagccgggtggattgcctgagctcaggagctcgagaccaacctgggcaacatggagaaaccccatctctattaaaatacaaaaaattagctgggcgtggtggtgggcccctgtagtcccagctactcagcaggctgaggcaggagaattgcttgaacccaggaggaggaggttgcagtgagccaagatcacaccactgcactccagcgtgagcaacagagcaagactctgtctctaaaaaaattaataatgcataaataaaataaataaaaatcagagagctaatttcacaaagaaatataactccctattggcctgagttagaagtatttgggcttcagtatattgggagaagggaaatatgtatagttgtgtatatgcatgcacacatacacacacacacacagaggcatggtgggggaatgaatgtggaaatggttagagtgaaatcaagatcaagttcagaataagtatctctggatagtaaaacaaaaaataaggctggccatggtggcttgtggccataatcccagcactttgagagggtgaggcaggaggatggcttgaagccaggagttcaagacccagactgggcaacatagcaagacctcacctctacaaaaaaaaaaaaaagtcaattgtgatggcatgcacctgtagttccagctattcaggaggctgaagcaagagatctcttgagaccaggagttggaggctttagtgagccaagattgtgccacttcatttcagcctgggtgacagagtgagactctgtctccagaaaaaaaaaaaagattcttattcatttcattatgtttcccatattttatacattttatacaaggtgcataccttgctttcatagcttatttgttagtttaagagaggtatttaggcttggagagtactgaaaaattttcctagtcctcggtcttgtgtacataatgtttctgtagattttttgaacatcactgtttctgttcagacacacgcaggtgaatcacttggaaaatgagagctaatcccagcccagcaatgaatggttccttccagacaggccaggcacagttgctcacatctgaaaccccagagctttggtaggccaaggcgggaggattgtttgagtccaggagtttgagactagcctgggcaacatagcaagatcgtgtctctacaaaaacatttttaaattagccaggcatggtagcacatgcccatagggccagctacccaggaggctgaggcaggaggattgtttaagcccaggagttcaaagttgcagtgagccatgatggtaccactgtactctactctgggtgacaaagcaagaccctgtctcaaaaaaaaaaaaaaaaaagcagggcacggtggcggtcaggagttcacgaatagcctggccaacaatggtgaacaaattgttctactaaaaatacaaaaaattagctgggcgtggtggtgggcatctgtaatcccagctactcagaaggctgaggcaggagaatcacttgaacctgggaggcgtaggttgcagtgaaccgagatcgcgccactgcactccagcctgggcaacaagagtgaaactccttctcacaaaaacaaaaaaacaaaaaaaccagataactcacctgttcttcaaatacatatcaggctagagaagtgtccaaaatgggtcatcaaagccaggagctagcagtgagtttttggaagttgatatagagaatggaaactgggattgggagatggaaatgagaagttggtctgattaagcaatggtctgcaccaatttcaatgcttagataatagtatcatatactagcagcgtgttggtgtcagcgtgttaaactaataaaaagccagaatgtaacagcctgcatagccctaatgcatttcaccagagagccatgtggaagccaaaatcctcacatgcagatctggcatgaggaagcttcctaagcgtctctcaggtagcttggtacaagttctgcccaacagaggtgcttcatacaccaggcagcaagcctacccaaatgagatcccctggttgggaaggtggacgtacttcatgaacaaagcaaaggtagatggttgtgtgcaggtcatctcacatgaggtgtctccctggttctttgtgaaaccctctctggacctcttctggttttgaaatagctcattcatggattcattctattaataaaagtcaaaagtaaacacttacataatgcttactaggtgtcagccatggtgctaagcacttcattcatattaactcattgtctccatgccacaatcctattacctgagttgacagatggggcaacgcaggcacagagatgttaagtgaattgctcgagatcacgtagacagcaagtggcagaatcataatttgaatcctagttcatctggatccagaatacagaccataatatcctcctgatgctcatgaaaatttgttgaaccagataccactggtcccagcagcaaatgactgtgctaaccccatattcccaagcctccatcgccaaaggttatctggccccatttcttgctagtggccctaaagaacataacggcgggtctccaggatggctggcgtgggagtcgctggttgcccatcttattccccccaccccccattactgaatgatcccttgattacaaacccagggtcattcattctttcttgactgtcgcacctctcattcactcaatacgaaaatatttggacaggcacggtggctcatgcctgtaatcccagcacctttgtaggccgaggcaggagaattacttaaggccaggagaccaagaccagccagggaaagatagcaagaccctgtctctacaaaaaaaaaaaaagaaaaagaaaagaaaagaaaatttaaaaataagctatgcatggtggcacatgcccgtagtcctagatacttaggaggctgagagtgagaggatcccttgagtccaggaggttgaggctgcagtgagccatgatcgtgctactgcactccagcctgggtgacagagtgtgatcctgtctgaaaaaataaaataaaataaaaataaaacatgtattgattcttccacttacgtattcctctaataagtacgtattgagtgcttgccatgagccactatctgtgctgggtgctcggtagtggaatacaatggtaaataggagaggcgaggtcaatgccctcatgaagctcacaagtgaaaaacaaatgtccatcattggtcagatggataaacaaagttatggtatataaatgcaatggaatatgattcagccatgaaaaggacagaagcactgatccgtgctacaacatggacaaatctggaaaacacgatgctgagtgagagaaaccagatacaaaaggccacatagtgtgagactccattgacatgaaatgtccagaacaggcaaatctacagagacagggagcagatgagtggttaccaggagctgaggggacaggggaatgagagtgagcgctcgtggggatgaggttttatttggggattggtgaagtgttctagaattcgatacaagtggtgattgcaccacactgtgaaggtgttaatgcctctgaattgtgcaccttaaaatcattcattgtatttatgaaaatttcatctcacaaaaaaaaatcaagtaagatgatcatagcatgtgattgattccatccgtttctttatcctatgtgtattaaggacccactatgtgctatgaactatacagacactgaggatacaagactagcatgcttcctgttctagaggctcttagagtcaatcatcagagaaatgccaattaaaatcacaatgagaggccgggcacggtggctcatacctgtggtcccagcactttgtgggggcgagacgggtggatcatctgaggtcaggactttgagaccagcctggctaacatggtgaaaccccatttctactaaaaatacaaaaattagccgggtgtggtgacacgcacctgtaatcccagctacccgggaggctgaggcagaagaatcgcttgaacccaggaagcagaggttgcagtgagtcgagatcatgccactgcactccagcttgggaaacaagatcaaaagtctgccccccccccaaaaaaaaaccaaccacacacacacaatgagtctgggtgcagtggctcaggcttataatctcaccattttgggaggctgaggtgggaggactgcttgagcccaggagtctgagaccagcctgggcaatgttagcaagactctgtctttacacaaaatttaaaaattagccaagtgtggtggcgtgcgcctatagtcctcgctttttgggagactgaggcagaaggatggcttgatatcaggagttggaggctgcagtgaaccatgatccccccactgcactccagcctgggccacaaagtggggctcagtctctttagaaaaagagagatatatatatacagaatatctattattttaaaagtaaaaagaaaaaaaaacagaggttggcaaggatgcagagaaaagggaaagcttatacactgttggtggggatgcaaattagtacaacctctagggaaacagatggcaatttctcaaagaactaaaaatagaactgccctttgatccagcaatcccactgctgagtatatacctaaaggaagagaaatcattatattaaaaagacatccacacttacatgtttatggcagcactattcactatagcaaagttatggaatcaacttatgtgtccattagcagatgattggatgttaaaatatggtatacaagctgggtgcggtgatttccccctgtaatctcagcattttgggaggtcaaggaagtcgaattgcttgagtccaagagtttgaaaccaacctgggtaacatggcaaaaaccccacctccactaaaaaaacaaaaataattcgcgttttttttttttttacaggcaggcacctgtaatttcagctattcaggaggccaaggtgatggaatcagctgagcctgggaggcagaggttgcagtgagccgagatcatgccactgcacttcagcctgggaaattggagtgagatcttgtctcaaatatataaacatatatatataaaatatacatatatgctatctacacagatcacatagatatgctatctagatagcatatatatatcggatacaaatgccctataaatagcatatctatcatatatctagatagcatatatatatcacatagatatgctatctagacagcatatatatagcatatctataccaaatacatatgccctatatatagcatatctatcacatagatatgctatctaaatagcatatatatcacatagatatctatatatctataaatatcatatatatgctctctagataacatatatatcacatagatatcctatctacatggcacatatatatagcatatatgtcacatgtatgtgctctatatatagcagatatatatcacatatatatgccgtggaatacttagccataaaaaacagtgaaatcttgtcttctgcagcaacatggagggaactagaggccattatcttaagtgaaatgaccgagaaatagaaagtcaaaaaaactcatgttctcacttctaagtggaagctaaaccatgggtacacatggacaaacagagtggaaaacagacattggaggctcccgtaggtaggagggtgagaagggggtgagggatacagtactacctattggctacaatgtacactatttgggtgatgattgcactaaaagcctagtcttcaccactagaaaatatatccatgtagcaaaactgcacttgtatcccaaatccataaaaataaattttttttaaaggctcttaattcttctagggcaggtgagagatgcccaaaagttaaaaagtaaaccaataaatgaataagataatttcagatagcggtgagtgctatgaagacacgaaagaaaatgtaagactaagccaggcgtggtggctcacgcctgtaatgccagcactttgggaggccgaggcaggagaatcacgaggtcaggagttcgagaccagcctggccaacatggcgaaaccccgtctctactaaaaaaaaaaaatgcaaaaaattagctgggcatggtggtgggcgcctgtaagcccagctactcaggagactgaggcaggagaatctcttgaacccgagaggtgaagattgcagtgagcccagctcgcaccactgcactccagcccagacgacagtgcaagactctatgaaaaaaaaaaaaaagaaagaaagaaaaaagaaagagagagagagaaaagaaaagaaaagaaaacgtaagactaaaaaagctacttttgggtagtcaaggacaccaagaacccagccagcaaaaatctgaagactgcaaagtggccagccatgggagtattctacctgtgggaacagcaagtcccaagcttccaagtgtgaaggcgcttcggacaccctgaagctgaaagaagggccatgtgctggaaggtaacggcgagaggaatgcctggtgagaagcctggcccttcttccatgcttaccgacatgcgacagagtgtgacctggacagctggaagcgcttaggacatcctaaagctggaagaagggccatgttgctggaagcaacggcgagaaggatgctagatgggctctttctcaaggagtcaggatgccagtgcacttaggccaagttccaaagcaaagactccatcctactcctccccccacctctggaattccacctcccttgttgcgcccatcgctatggtgacgggcgctctcagtacactgtctctacaggccaggaaagagttgtgtgtctttggggtcccttccgctccgcctagggttcccggccaggccgagagaccaagcagggaccatgcgcgtgttggtacccccggctgagcgcagccaggacacacgcgttggggccccagcatggcgcgaggcagctcaggccatggcgaggaccgcgcacattctgaccgatcgctgcgggcaggaggcggtgaccatgtggcagcccaaggacagcgtgctggacccgaacgtggcccaccacctcggccgcgccgcctacatccagccctggcgcttccgcgtggagatgatcaaaggcggcggcaccttggagaagccgccgccaggcgagggcgtcacgctgtggaagggcaagatgaagccgcccgcctggtacgcccgcctgccgctacccttgcaccgcaaagcgcgcgccctgcagaccaccgaggtggtgcacgcgcacgcgcgtggagcgcgcctcaccgccgcccgcctcggccgcgcgcagcaccagattaacgggcgggtgcgacagctgctgcgccagcgcgaggtcaccgaccacaggctcagcgaagtgcgcaagggtctgcttattaaccagcagagcgtcaagctgcggggctacaggcccaagtctgagaaggtgggaccctcccccacgcccaaccccagcctaactgcaaagactgaggcctccgctatgcggtgtccagccccggggaaatcctttccatactttgggaggccaaggctggttgatcacctgaggtcaggaattcgagaccagcctgaccaacatggtgaaacccccgtctctactaaaaatacaaaattagccgggcctggtggcgcatgcctgtaatctcagctacttgggaggctgaggcaggagaatcacttgaacccgggaggcagaggttgcagtgagccgagatcgtgccattgcactccagcctgggcaacaagagcaaaactccatctcaaaaaaaaaaaaaaaaaatatttccatagagagaacacccaactccggtgaataagggcacaagaagatgagggccagatgcagtagctcacgcctgtaatcccagcactttgggaggccttggtgtgaggaccgcttgagtccaggccttccaggttgcagtgaactatgatggcaccactgtgttccagcctgggtgacaggtgagaacctgtctctaccaaaaattttaaaaagttagctgggtgtgttggtgcacacctgtaatcccagcattttgggatgccgatgcgggaggattgcttgaggccaggagttggagaccagcctgagcaacatagtgagaccccgtctctacaaaaaaaaaaaaatttttagtggcccagcatggtggcatgcacttatggtcccagctacttggaggctgaggcaggaggattgcttaagcccaagagtttgaggctgcagtaagctataatcaggccaaccgcaaaccagcatgggcaacacagtgagatcccatctctccaaaaattgcaggtaaattagccaagtttggtagtttgtgcttgtaatcccagcacttcaggacaccaaggcaggaggattgcttgaggccaggagtttgaggccagcctggacaacacagcaagaccctctctgcaccaaagtttaaaaaaaatagtcaggcatggtggtgcatgcctctagtcccagctacttaggaggctgaagcaggattgtttgagctcaggagttcaaggctgtagtgaaatatgatagggccactacacttcagcctaggagatagtgagactcaaaaacaaacaaacaaaaaaagatgatggatacaggcccaggaagagatgcctaagcccccaagacccaaagagtgagccctgcccaaggagatgagatcctcagcttccctgccccagaggagaaaattatccaaatctcccagccagggagagagggtgcagcccctgattcagactccttgaaaatctccccaaaaagtaaaacccacagccctcagcccaggcataaaatcatccacctagaccctaggcccagagggtaagacccttccatagatgtgagaccctcagtgccccagtcctagtgaaaacacactcccaactcccagctgaggagagcggctgatacccttgtcccaacccaggtgaaactcccccccagaatgttaaataaaacccaattcccctggcttcaggaagtgaaaatctccacccccaggcctcgtctgtggtgaaaggaagaagtcctccctacagagagagacttcagactcccaaccctcacacccaaaggttaagctcccatccagggagaaagagtaagacttctagtaccagtcctggtgaaatcttccccttaaagtgaaatctcaaatccccaccccaaaaggtacaaaaattcctgcctcccgggggagagatgagaccccacccacagaatgggattcctaccctcagcccccagatccaaatattaagactccaaaaacgtaaaccctcatcatccgtatgatatgatccctccacctgtagccagggagaggagataagaccatcactgaggaaggggtgcccagctcccagcctcagggggtgagaacaaccctcccccaagttgagacaccttcatctcagccccctgggctcctatctgtaaaagagagacgcccccaacctcaagctccagagagcaagacccgccaagtcagagagcccactgaaaagatcaaaccttctcaaagagtgagacaccccacccaaaggatgagagtaccctcaacttcatccttcaaactcagagtttatgaggctggcaaaccctctaccaccctggaaagaggaatctcttcccagccctttcttaacgatgtgagggattctctcctcgttttctaggtccctgacaaagctgacagtatgcttacatgggagaaagaggagctgaaaagcatgaagaggaaaatggagagagatatggaaaaatcagaggtcctactcaaggttaggggtgcctgtggacaagttacgggggctggagggggatccctggctgcctaatggacaaaccactctgacctggggactgtcacaatagcaattccttcaagccacactgaccagatattcactgcattttgctttgtgaaatggaaaaagggaggtcatgggagatgacgttgggtctcagaataacaacgaacaaccactctgtaccaaaccctgcgcagtcattgaatccactccttaaggctgtcctgtgaggcagaaactatgatttcctcaatagagatgggaaaattgagacccagagagagacctcacctaataagcaaagccatcagtgaaagcgctgtggtttcagcccaagtgactagagtctagctctttgcactctaacacgtgctccagcttcagccagacttgatctctcgctgcatccttcgcacttgcaatgagaacttcttcatgagggcacaaattaagggggaagagcagccagacttcagggggccttttggacctgttaaggttcgctggaaatttgtgtgctttcgactcatccttttgataaatactaatctggtacctgcttcccaggcaccaggcttggcatcatagataaagtggtgactgagaaagaactagccttgtccttgaagagttaacattctaaaggcattcaaagaaaatacaggctgggaacttgttttatttcctattgtgagattgaagtcttttattgttgttgaactttccttgcttttatgtatagatctcctcagctagactacatttaaaaaagcattggaccttgaaggcagatatagtactaaattatatttcacgtagcaaagctcagtaaggttgtgttgactggggagtggggaggaggggagaagaagggacaggctgggggacgagggtgtggacgaggcaggagactcagtgggggggcggggggcgggggctgctgaaacgctgtccgtggtgctgaatcggaatactgcatatcttctggccgctgtcatattcctttaaatctgatgattcctgaaatatccttccaggaagtcggaggcagagaagggagaagcccctgaggatggacgtgggagcaaagggctataaagagggaaatggatcatgcccataatctcagtactttgggaggccaaggcaggaggattgcttcttgaggccagaagttcaagaccagtctgagcaacatagcaagccctcatctatattttaaaataaaataaaactagccaggcacagttgcaagtgcctgcagtccctattcaggaggctgagggaggaggattgcttgaatccaggagttcaaggctgcagtgagccatgatcatacctctgcgctccagtctgggtaacagaggaagaccctgtctctgtgagagtgagagagagaggtgggaaaggacagatatagatagaaacagagacaggctgcttggcaggacctagtctgaatattgctggagaaaaatacttaccaccaatcagatttgtttcaacttaaaatcatgaagtcaaacctcaaattggcactcaaacctttcccagatacctcgccttaagtctctagaagacttgctgacctgctgggcaagtgatttcataacttctcttcctttagtcctctccagctccctgtgccttccttgctctacggtgatttcaatgaaaaccaccaaagggaacctctctcatttttcctctgtcaatcctataattccacccttccacccttctcctgcaccatcaacatttccttctctcttggctcattgtcaccagtgaacaaagggagaattattctttcatgggtacagatctgttgggatgatgaaaaattctggaggtggattgcaatccagcctggaagacagagcaagattctatataaatgaatgaaggaaggagggaaggaacagaacaggtaaaattaatctccaagtcagcttactggagatgatggttgtacgaatacacttaatgccactaaactgtacacttagcaaggttaaaatagaaacatgttatgtcatatctattttactacaataaaaagcccacctctcttgatctacatgcccctctagatacccatttctctagtccactgcatcttatctgcatatgtcaacttgctcatgttgactccaggcaggctcctcagctaaactgcatttgaataagcattggaccttgaaggcagatacagtactaaattatatttcatgtagcaaaactcagtaaggatgtgttgactggggggtggggaggaggggagaagaagggacaggctgagggtcgagggtgtggacgaggtaggagactcagggactggtggaacgctgtccgtggtgctgaactggacagctgtccttttttttttttttttttttttttgagttggctctattgcccaggctggagtgcagtggcgtggcgtgatcgcagctcactgcaacctctgccttccgagttcaagcaattctccgacctcagcctcccgagtagctgggattacaggtgcctgccagcacacccggctaatttttgtatttttagtagagacgtggtttcaccatgtgcgccaggctggtctcaaactcctgacctcgtgaccacctgcctcggcctcccaaagtgctaggattacaggcatgagccactgcgcccggcctggactgctgtcttgctggtcactgtatccccaccacctggcacatcgcctggcatcagtaggggtttaattaatatttgaattcatgaacaaaagactttttaagtctgctttttaaccaaatgaataaatcccaaagataccatattcagagaaagaagctggacataaagtgtacactctgtaggattccatttatatgaagttttagattcagcaagggttttcctcaaggtacagttagtaaatgctttcagccttgtgtgctgtgcagtttctgtcacaactactcaacttggccagtgtgccatggaaacaacgagaaatgatatgcatatgaatgggcatgactgtgtttcaataaaattttacttacaaaaacaggtctgccatccataggatggaaatttatcaactccttaacaacaggcaaaactcggctgggtgcagcggctcacatctgttatcccagcactttgggaggcccaagcaggagagttgcttgaggccaggagtttgaggccaggaatttgaggccagcttgcacagcatagcaagatatcatctctacaaaaatgtttaaaaataactgggcatggttagcatgcacctgtagtcctagctatttaggaggctgagctgagaggatctcttgagcccaggagtttgaggccacagtgagccaggatcatgccactgcaatccagcctgggagacagagcaagattctgtaaatgaatgaaggaaggaaggactaaaacaggtaaaactagtctccaagtcagcttactagagggggtcagggagggacagaggaaaggggagccagagaaatgtatggcatgatggaaatattttatatcttgatggagagtgtttataagggtgtatatatgtgcaaatgacttgttttgatataactctcaaataattgcaaatatcaaaggaatatgatatgcttcattttattgtggaggaagtaagatttcgatggcgggatgctgtccagatgagacacagcctggtgggaggggggaactcagagaatagcagtctcttaatattgatcagagcagaggaagggagacttcaaggctagaggtggggatgggatgagtgccagttgagaatcaagggggtgacacaggaagatcaagatgtgggtatagtgagtgccagctctccatgttacagtggggaaatgcatgagacaggctcttttctcagggtgccagaacagagccaggcacagaaaccaagcaattgacacccagcacagggaagctgttgctgtctcttactgctcccctcaccccacccccaaagagtcactgaaggcttctgaactgggtaaggaggcaggagatgtctgagcttcaacttaggaattgcttcttcccaagaacacaaacaagagctggaaaggggccgggtgtggtggctcacacctgtaattccaatactttgggaggctgaggcaggaggatcacttgagcccaggagttcaacactagcctgagcaacatagcatcactctgtctcaaaataaaagaacaggaaagggtcaagaatggagtgaggaaggaaaccaatttctcagaaccaatccatatcccagcactttgggaggctgaggcgggtggatcacctgaggtcagaagtttcagaccagcctggccaacatagcaaaatcctgtctctactaaaaaatacaaaaattagctaggtgtgatggcacatgcctgtaatcctagctactcatgaggctgaagcaggagaatcctttgaacccgggaggcagaggtttcagtgagccaagatcgcaccattgcatgatctgtctggaagtgagcagactcacttttacctgattattatgcacagtaccataaacagaagacaactttgtgaataaaaaagtgattttaagacatttctctagctgggcacagcagctcgcgcctgtaattccagcattttgagagcccaaggtgggtggattgcttgagcccaggagtttgagacaagcctggacaacatagtaagaccgcgtccctacaaaaattaaaaaaaaataattagccagtgtggtggcatgtgtctggtgtcccagctacttgggaggctgaggtgggaggatcgcttgagcacaggatgtccaggctgctgtgagctgtgatcatgccactgcactccagcctgggagactgagtgagaccctatctcaaaatatgtatatatatataacttccctggattacctgacatccaagtgaacacccatcacctgggaaaaatgtaagcagaattgcctgacccttgactcttatttccacgttcccataccttaacacaccttcccttctctaaaagccacgtttgcaggaatatctattcagcaccaccaactcatccatgtgtttatctgtaatggctattgaggaaactgtactgttcatggttgtttttgtttttgttttgagacaggatctcactctgttgcccaggctacagtgcagtggtgcaatcatggctcactgcagcctcaacctcctgggctcaggtgacccccccacctcagcctcctgagtagctggaattacagacgtgaatcatcacaccttgctaattttttgcttttttgtagagatggagtttcaccatgtggcccaggctggtcttgaactcctaggctcaagcgatcctcccatcttggcctcccaaagtgctggaattacaggcatgagccaccacacccagcctgaatgcagtgattttttcacagtgtgtttataggtcaaaacatcaagttgtacactttaaataaatacaatttttatttatcaattatacctcaataaagctgggaaaattaagtggaaaagaatacgttttaaatgaacttactacaaaaaaatgataagtatgtgagacgatggatatgttaattagtttgataacatccttccacattgcatacacaaatcaaagcatcacattgcatgccataaatatatacaattattatttttcaattaaaaacaaaaatttaagtaaaataataaagtaaaccttgaggggtggtgtgatgtgagtcaaaggaggaaaaagaatcattttttcataagatgtagacatgtctctcctaaaaaagattttgtgaaagaaaatatttatctggaacattggggaaataagttaaatcaaaaaatatttccaggccaggcacagtggctcatgcctgcaatcctaaaactttgggaggctgaggcaggaagattgcttgagcctaggagtttgagaccagcctaggcaacatagtgagaccctgtctttacaaaaaaataaataaataatacaaattagctgtctcaggaggctgaggcaagaggatcgcttgagcccaggaggttgaggctgcagtgagttacgattccaccactgcactacaacctgtgcaacatgtgtctcaaaacaaaaaaaaataatatatatatacccataagtaaaaacctttaccagtatcaaaaaaaaaaaaaaattaggcacactgcctcacacctgtaattccaacactttggaaggtcaaaggaggaggatagcttgaagccaggagttcaagaccagcctagacaacatagtcagaccccttcttcacaaaaagttttaaaaatagcaaggcatggtgctttactcctgtagtcccagctactcaggaggcttaggcaggaggattacttgagcccaggatgttgaggctctagagagctatggtggcaccactgcactccagcctggatgacagagcaagattttgtctcaaaaaaaaaaaaaaatgagagtgtcagtttccgtttagaggtagaaatgctttacagcctataaggctcaagcctgcagcagagaaatcacttgcatccacttccctcaacctcccagttctcactctgtcttctcctcccctccccacccagaccctggcctcctgccgagacactctgaacttctgcttcaaggagcggctccaagccgtggacctcatgaaccagcctctggacaaggttctggagcaggccagacgccactcatgggtgaacctctcccgagcccccactccacgcacacagggtcagaaaacgcctcctccagaccctgtgggcacctataacccaggtaggagtccactgtactgggtcgtattggtgcccacccagatccccttgactgtcagtgcagcccgtcgcccacttagctgtccctttcctgggaaatagccctagagtcaatgggaggactgaaagcctatcatgctgagcacacattgtcactcagcttttccccctgcactctcctgcccacactcgctgaggactcagtcattcacaggctctgctttttttttttttcctttgagatggagtcttgctctgtcacccaggctggagtgcaatggcctgatctcagctcactgcaacctccgcctcccaggttcaagtgattctcctgcctcggcctcctgagcagctgggattacaggcgcccaccaccacgcccggctaatttttgtatttttagtagaggcgggtgtttcaccatgttggccaggctggtctcgaactcctgacctcaggtgatccacccgcctcagcctcccaaagtgctgggattacaggttacaggctctgcttctaaggaaaccaacccaagacgcttcttacactatcccccgcgccccctggactttcacccagttcctcaataaaaccccctcgcccagggcccaccaccacctgagaatagagagagggacaggggctctgggaacggaggacttggcacccccacgcgcatcctgggcatttgcagcgtgcgccttggcgctaaacgaagccaagcggttgttggtcgagtccaaggacaccttggtagaaatggcaaagaacgaggtggacgtccgggagcaacagctgcagataagcgaccgtgtgtgtgcctcgctggcgcagaaggcgagcgagaccttggagctgaaggtgagcgcattacctgcggctgcgggccagggtgggacaggggaggagacgcggactgggagccagcgtgatccccctgcgcttccctgcccccaggaaagattaaatatgacgttaggactgatgaggggaactatcctccggtgtacgaaatataaccaagagttgtacaccacccacggtctcatcaaggtacggttcggggtgagagccttcgggggtggaggcaggggtgccggtggctggaggctgggtttcaatgcgcttgcacaccgcaccccaccagggtcctctgtcgaaagttcacctggagaccgcagaaaagctggacagacccctggttcgcatgtaccagagacacgtgggcacccaactcccggaggctgcgcgcctcgcacaggtaaaccccctcccccgtacccctctaggcccagccccgccaatggtaaggctccttcctcaagcacatctggaccaggtatgatccccctctcacccaagtcggcctgtccttcaactcctgccacgaagtggggaggcgggggcttcactgggtactgaagtgggtactggcgggggcttcagtgggtactggctcaaataagtcccctcaacccctgtcctcccccctcacacacaccctcactgtccagctctggccttagtctctctaacctgtaaaatgaggagcacgtcagcacccacttcaaatggtggtggtgaggacagatgagttcatgcatgaaaggtgtgtagcatggcacctgcatagaatacccttaaagctgcccagctgttattattaactattattgttattattatttgagacagactctcgctctgtcgcccaggctggagtgcagtggtgcaatcttggctcactgcaaccttcacctcccgggttcaagcgattctcctgcctcagcctcctgagtagctgggattacaggtgcgcgccaccacacccggctaatttttgtatttttagtagagacagagttctgctatgttggccaggctagtcttgaactcctgacctcaggtgatccgcccgcctcggcctcccaaagtgctgggattacaggtgtgagccaccgcgtccggccctgagctgttattattaagtacccttcctaaggaggatccttcctacacatcttgactagatgcattcccctccctcagcctgccctgtcgcggttttttttttttccaggcacacctggcccattcagatgtgttcccctcctcagctgtgttccttacacacacacctggcgcaggtgtgccttcccacgccaggtagccatctgctctggctcacgggtctgccctgctccctatccagggcaccgacaagctgcagtgccacatcacgtacctggaaaagaacctggacgagctgctcgccacgcacaagaacctcagctggggcctcaactgcaagaacatcgggcatgaggtggacggcaacgtggtgcgcctgcgcctgcgccagcggcaaccgcacgtgtgctacgagcaggcgcagcgcctggttaaggactgggacccgcgcacgccgccgccgcgcagcaagagcagcgcggacccctagtgaccccagcgtcccccgccccagccagctgattggatgctggctgggacctcggagagcagacacagccccatggccctccctctcccctgacgcaccctccctccaagcaccctctaggagaattataattaaaaataacaataattatcatgtattaggcacctactgtatgtcaaccacttaccctaggacacgttataagcgcatatcctggtagttaataggatggatttgggtgccagatggctgggatttaaattccagcttcccagtttcaagctgtgtggccttggacaagtcactgtccctctctggccttggtctctccaacctgtaaaatgaggagcatgacagcacccacttcaaatggtggttgtaggcggggcgcggtggctcacgcctgtaatcccggcactttgggaggcggaagcaggcggatcacctgaggtcaggagttcgagaccagcctggccaacatgatgaaaccctgtctctactaaaaatacaaaaattagctgggcctggtggtgcgcacctgtaatcccagctactagggaggctgagacaggagaatcgcttgaacccaggaggcggaggttgcagtgagctgagatcaagccactgcactccagcctgggtgacaagagcgagactccgcctcaaaaaaaaaaaattggtggctgtgaggacagatgagttcatgcatgaaagccctatagtatggtggctgcatagtatatcctcaaggcacctgagctgttattattggcatctccattttacagttgaggaaacaggcacagagaggctgtgcagcttgcccagggtcacacaggaagtagcaaaactggaattttcattccagactcaagagcctgcactctaagtggaacttctaggagctctgctctgtcctaccccatgtggtgtctggtcctgagcccagcactgagaataaagcagtgagcagggctgatgtggtccccactctcagggaggtcacaggttgatccagtgcagctaatgtcatccatttgggtgtggctctggttcaggtccttctgcttttccagtaggctcttggacaccccgccatcacaggacccctcacactgagctgtgattcttatctgctcttcccaggaagatccagggtgttgcacacatacagaaagaatgtgcattacagccacaggtatctcctaagcaactgctctgtgtcagaggctgtgtgaggcgccagggatacagcaaggatgtgtccctccgtcgtggagctcacagtgtatatgctgagaatggccttcacaaatgttggtatccttttggcaaagccagccaattgtatggacctaagcaccaacgtttagcagagaagaaaatgaagctcatttttcttctcattttcccagggttacacagccagagatgggtaaagcaagatttcaacctgtcatgctccacatctcaagcagggaccaggatctgaatgagtccccaaaacaagagaatggagattgggtcaattatggccactggacagaaaaacgcatgggcaaaaaagagagccatctgcccaggatgacagacctgggtaggagttcagctggggatcggctccattggtctgactcagaagcattgtgtgtcacagccagctcccttatgtcaagacagactctacagcttgggggttacaggcccccagtctccctggggctcagactcccacataaactattcttcttcaagcacttcttcccagtaccaatcaggatatcaacaagaaacagcacactccatttgcaagaagtttaagggccaggtgcggtggctcacacctgtaatcccagtacttagggaggccgaggcaggcggatcatttgaggtcagacgttcaagaccagcctggccaacatggtgaaactctacctctactaaaaatacaaaaattagccaggcatggtggcgggagcctgtagtcccagctacttaggaaggctgaggcaggagaatcgcttgaatcccagaggtggaggttgtagtgagctgagatcgccccactgcactccagcctgggtgacagagtgagactctgtctcaaaaaaaaaaaaaaaaaaaagagagagagagagaaagaagtttaagagaccacagttgatcctcattatccccaaatttacttgctaattcacttaccgaaatttatttgtcacttcaaaatcagtacttgtagtgctttcacaatcatttgcaggcatgcacagagccgtgaaaacatttttagccacctgatgttcacactgcccctctgagggcaaagaaggtgatgctgcctttttgtgccagctctcttaccataaacaagtgtccttgtggtagcctatttagcatctctgtctctctctctcttttttttttttttttttttttgcatttttgtgcattttgttggtggtttttgctgtttaaaatgacttccaggggttagtgctgaagtgctgtctactgtccctgagcacaagaaggctgaaatgtgtcttaggggaaaaatacatgcgttagataagcttcattcaggcatgcattatagtgctgtggccgtgacctccatgtgcatgaatgcatcacatatattaaataaggtgtctttttttttttttttgagacagagtctcactctttttgcccaggctggagtgcagtggtgcaattttggctcattgcaacctccgcctcctgtgttcaaacgattctcctgcctcagcttcccaagtagctggaattacatacacacaccgccacacccagctgatttttgtatttttagtagagacagggtttcactatgttggccaggctgctctcgaacttccgacctcaagttaacttccaaccacccgcctcggcctcccaaagtgctgggattacaggcatgagccaccgcacccggccaaataaggtctctttaaatagaaacacctaaaacaaggttatgtcttgattcgttgacaaaagggctgtgaccacaggctcacagaaacctaatcctgtatttccccatgagccatggttcagcgttcactgattcagtgtgcgtggtggctttatggaccattaccgcaaataacaggaattaactgtgtttgcaaaggtgtgggcagctagtagggaaacctcaaaggatagctagcataatatccacatgccagtgattgcggggagccttttccacctgtgggtctgaagggaaagggctgttagcagatgggagcatgtaactctgtgatgctgcagtgtagacgccgtgaaatgcccctacccacctctctgtccattggccagtgtccccgatgggccgaaccaccctgctgacttttgaccttcacgcaggtccttcccggagctgggaattatccctttaccctcacctttgcccatcttgatgcccagaaatcttgcataggaggcaaatgctccccttgcaagcaatgtcttgccctggggtttgcagcctgccaccctcaccttgctgtcaccgccccagtttgtgacctcagctcacacaatgtccccaaacagcatttgcacaattccccccattgcctcagagctgagatttcagctgctgccctagatgtgagtcctgtgcacccagcaagcttctccacgacaccatgaggtgggtgtcattatcccaaccttagagatgaagaaataggcccaaagcagtacaaaatgtatagatgccaccacccagcaagtaaggggctaagtgtgggctgtaaaaattgtaggcagggcaggcgcggtggctcatgcctgtaatcccagcactttgggaggccaaggctggcagatcatttgaggtcaggagttcaagaccagcctggccagcatggtgaaaccctgtctttactttaaaaaatgcaaaaattagctgcacatgttggcacatgcctgtagtcccaactactcagcaggctgaggcgggcttgaacccaggaggcagaggttgcagtgagctgagatcacaccactgcactccagcatggccaacagagcaagactccatctcaaaaaaaaaaaaactgtagggagtccccttaccccccaaaagtcctcctggctggacacagtggctcacacctgtaatctcagcactttgggaggctgacttagaaggattgcttgagcccagaaggttgagacaagcctgggaaacacggtgagaccctcatctctacaaaaaaagtttacaaaattagttgggcatagtggcccatgcctatagtcccagctacttgggaggctgaggcaagaggattgcttgagcccaggagtctgaggctgcagtgagctgtgatcacaccactgcactccagcctgggtgacaaagcaagattctatctaaaaaaaaaaaaaaaagtcctcccatacccctcaaacaatgatcaggtatcacctgcatgagaacacctacgtgcaccaggttccaggtcacactccagacctacggaatcagaatctcagaaggcaaagcacaaaaatccgcattgctcatgagctttctaggagggtccaatgcacaccaatgcttgaaatgcattgcctgctgttgctggtttcccagggctgacttctgcattgggcatagtaaacactaatgagagagcccacaaaaaatatttttattgtaatttctttctttttttttgagacagagtcttgctctgtcgcccaggctggagtgcagcagtgcaatctcagctcattgcaacctccgcctcccaggttcaagcgattctcctgcctcagcctcccaagtaactgggattacaggcagccgtcaccacacccagctaatttttgtatttagtagagacggggtttcaccatgttgatcaggctggtctcaaactcctgacttcaggtgatctgcccaccttggcctctcaaagtgctgggattacaggtgtgagccactgtgcccgacctgtagtttctttttaaatcagaagaaaaatatgaatataataataaatatatgacatactgcattgtatgttatttatgtgatacacaatttatattcatctctatactaatgtaggggtgtttttcacattttgggagttttggggggtttttgagacagggtctcactctgacacccagactggagtgcagtggcataatcatagctcactgcagcttcaaactcctgagctcaagtgagcctcctgtctcggcctcctgagtagctgggacgacaggtgcatgcccccatatctggctaatttttgtatttttttggagcgatggggtctttctctgttgcccaggctggtctcgaactcctggcttcaagtgatcctcccacgttggcctcccagagtgctgagattagaagcgtgagccactgcaccttgccttttcagcatttttttcattgtggtaaactacacacaacaaaatttaccctcttaaccatttttaagtgttcagttcagcagcattaagtaccctcacagtattgtgcaaccttcaccaccatccatctccagaactctttaaatcttgcaaaacagaaagtctataccctttaaataataaccgctcctttcctcctccgcatcccccagcccctgtcaaccactgataccatagataccactttctgtatatgactttgactgttctaggtacctcatataagctacatcaataaagttttacgtatttattttttgatggaagaaggaactcacaaaggtaaatgtgcctcaggcccataaaacccaaaatttggccctacaacttccccttaaaatattgggcacattcctctcattcatgtatttattttacttatttaatttatttattttttattttttgagacagattttcactcttgttgcccaggctggagtgcaatggcacgatctccactcactgcaacctctgcctcctgggttcaagcgattctcctgcctcagcctccagaatagctgggattacaggcatgcgccaccacacccagctaatttttgtgtttttgttagagacggggtttcgccgtgttggccaggctggtctcgaactcctgacatcaggtgatccgcctgcctaggcctcccaaagtgctggaattacaggtgtgagccactgttccaggccgacattgggtaaatatttaagtgaatacatgaacaaataaacagataaagtttgcagagtgttactgtgtgcattgccttatttaattttccactttagacctggaaagttcccttcgtaatcatccagttcaccatgctttgctgtcttccttattctctttccaattttcctggaaagtgagaaactgacatgggaagcaagcagcacagcatccgctgtgggagagatgcagacctgggcttgaccctttagagctgtgttacctcgggcaacttgctcaacctctctgaccctctgttttcgtgacctataaaactgtggatgggcggggcacggtggctcagtgagcctgtaatcccaacactttgggaggccgaggcaggtggatcacctgaggtcaggagtttgagaccagcctgactaatgtagtgaaaccccatctctactaaaaatacaaaagtagccagatgtggtggcgggcacctgtaatctcagctactcaggaggctgaggcaggaggatagtttgaacctgggaggtggaggttgcagtgagtggagattgcaccactgcactcgagcctgggcgacagagctagactccgtctcaaaaaaaataaataaataagataaaataaaaaaataaataaaactggatgataaaggtatctctctcatcaagttgctgggaggatccgttaaggcaatggggtttttgcatagtattccatggtgtatatgtgccacattttcttaatccagtctatcattgttggacatgcgttggctgggttggttccaagtctttgctattgtgaatactgctgcaataaacatacatgtgcatatgtctttatagcagcatgatttataatcctttacatggatgaagctggaaaccattattctcagcaaactatcgcaaggacaaagaaccaaacaccacatgttctcactcataggtgggaattgaacaatgagaacacatggacacaggaaggggaacatcacacaccggggcctgttgtggggtgaggggaggggggagggatagcatttggagatatacctaatgttaaatgacgagttactgggtgcagcacaccaacatggcccatgtatacatatgtaactaacctgcacgttgtgcacatgtaccctaaaacttaaaatataataaaaaaaagacaatggggtttttcatttagttcagggcctggcatggggggaggtctccacacatggtttatgctccttttgtttatcaaaatgacattcacataaaatgagccatcttaaagttagtggcatttggtaaattcacaattgttgtgcaaccaacgcctctatctagttccaaggtatttacatccccccaaaaaggagaccctgtgcccatcaccagtcactccttatttcactctaagaaagaccttactgcttctaaccatggaggccatgctttgcaaagcagtgagttccctggccaagaagcaatcaagcacgggctataatttttcagggagcctcatacaggactaaaacagtgggtgttttgttttgttttgttttgttttgttttgtttttttgagacagagtctcgctctgtcacccaagctggggtgcagtggtgtgatctcagctcactgcaacctccgcctcccaggttcaagcgattctcctgcctcagcctcccgagtagctgggattacaggcatgcgccaccatgcccagctaatttttatatttttagtagagacagggttttaccatgttggccagggtggtctcgaactcctgacctaaagtgatcctcccgccttggcctcccaaggtgctgggattacaggtgtgagccactgcacccggcctaaagtagtgtttcttgaccaggcgattctcccactactcttagggacatgtggcaatgtctggagacatttttggttgtcacaactggggatggaatatcttgctggcatctattgggtagaggccagggatcctctgaaatatcccacagtggacagggcagcttcctgccatgacaaagaagtcttcagttgaaaatgtccattgtatcatggttgagaaaccccacaccaaaataagataactcagaatcatcttcaaagtcaaaaactcttgaacaaagcctggaagtagagacagcagcatattgggattggttatttcagtgcattcttctttccatctatagggacactccgaggtctcatcatcaagtatttcttccacctaaaactctaggatatctgggggaatgagcagctctctccatcaagtccaaatgtgttgtgatatggtttggctgtgtccccacccaaatctcatcttgatttgtaggtcccacacttcccatgtgtcatgggagggacatcttacatggtggcaggtaagatgattaatttgctatagcttccacattgtattccaaaataactgtcccagcacccctcctcatgcctgtggtcagcagggagaaggaaggaggaaggaagaaggaaaagacatgttcctcccctttaagggcatgacctggaagttgtacatacaacttctgctcacttcctattgtccagtacttagtcacatggctacctgtagttgcaaaggagcctgggagacataatctttagcttggtggccatatgccaaactcatatttatataactctgccactagatgcagtatggatttgggggaaacttgaggttttcgtgacactcttcatccattaacaaagaatacttgaggctgcagacttgaggaaatgcttgaaagatggaatgaagagttgagtgatctagggatcaggttgaccatgaatgaagtagggacaagactttcagtcccaacaaagtatttagttgatggaattctgcagaggatggtgactcacgttctagaacctagaaatgggaaagggcccaatcacctcattttacaaatgaagctgctgaaacccagataggagaagcaatttcatttaggtctttcactgagtttgtagcagctcagggctaaaattgaggtccccgactccattctcagtgctctcttcacaactccattcatcctctagagctgtagactgagaaagcaaaccatgaggcttgtggctttgacatgaaggaagcaggacactgctagatccttgaggaggcatatcttggctaaggataggctgagagggcatggagaagccattgagacccgttgtggctatggaactatattctggccaactaaatgagagtagaagggatatgtgaaatattccagcaattcctttaagggaaaggagcatacttctttccccttcccctttcctctttcttcccaactagaacataggatgtgatgataggagctgaagcaaccactttgggttacatggtaaagatgtatgttcaggcaagcagagcaacaaaatagagaaagtttggctccctggtgattactgagcctccattccagctctgagctatctatctgtatttctgcatgaaagaaaaaaaatataattctatttcttaagtcagttacatatgtgtgtgtgtgtgtgtgtgtgtatatatatatatatgcgtatatatatgcatatatttctttgagacagagtctcactctgtcacccaggctggagtgcagtggcacgatttcagctcatgcaacctctgcttcccaagttcaagcgattctcctgcctcagcctcccaaatagctaggattacaggtgcctgccaccacacccagctattttttgtagttttagtagagagggggtttggccatgttggccaggctggtctcaaactcctgaccccacgtaatccacctgccttggcctcccaaagtgctgggattacaggcatgagccaccgcacccagcccagttacttatattctgtaagacttccaagcttataagtaatatatggggtcaggagggggcggattatttctttcagttccgacattgtgttagtagaagtccagggtcccctttgcctctccacctccagaggcataaccatggaccactaagcagctctctcctcccaccttccccagttcatcactggagtcatctactgacctaaccatatgtccctgcaaagcattgtatctctgtttggtaagacccaaaagggggtgatctgcctgcctcagcctcccaagttcaagcgattctcctgcctcagcctcccaaagtgctcggattacaggcgtgagccaccgcgcctggccagtgatccttgttttacagggtaagttctgagtgccagagggggctaggaagagcagagccatcttgctctgaaaagtccctgcatacttgtccagccttacccctcctccctctgtgctgcaggaaatattagagaatgtggattctggagtcagctatcggttcaaattgtgatgcgggtgattattaattgagagaccttggccaaactatttaaactctctgtgcctcagtttcccccatatatatttgttataataaagattcttatcttgcagggctgtgagaattaaatgagatagtgttccttaaagtgcttactacagcgcctagcagacagtgagtgagtgctccatcaacagagaggacaaatattgacctgagtcattaaaaggatcaaaggagggccaggcacagtggctcatgcctgtaatcccggcactttgggaggctgaggcgggtgaataacgaggtcagtagttcaataccagcctggccaaaatggtgacaccctgtctctactaaaattataaaaattagccaggcacggtggtgcacgcctgtatgcctgtagtcccagctactcaggaggcagaagtgggaaaatcacttgaacttgggaggcagaggttgcagtgagctgagatggcaccactacactccagcctgggtgaccaaccaagactccatctcacaaaaaaaaaacaaaggatcaaaaggaggaaggccaggtgtgattgatgcataaaaatgaaggagatcttacccagtggaagagaaagcaggtcagggacgtccctaagaaagctgacattaaagctgacatctgaagtatgaatggacatcagtcaggtaaaaaagagaaagtggggaagactcaggaaagcataacagcctgtgcaacggccctggagcaggcgggaaagcatgtgatgtgtttgggaagttgaagatatttttaagatggtggtggatgaggctggagaggtggctaggggctcaatgttgcaaatcagattcctctttgaatgtcatctggatgcctttttccttcatatttatttcacttgggacccctctttttctgtatatcctccttgctggaaagtcacattcttccaacagaaatctcattctcattgatgaaaaattctgcaatgcatcagtatacttgaagactcaaggactcttgtactgtcagacagcaatcctgggtacccagtctttatccacagattcttaaagaggtttccccactctggggcacttgcaaagtgcctggcctaatcgaagccttatacattgaggaaagtcttctctgggtctgatttgagcagtcttgaatgtacttatctccttcggttctgacactaccacctgtagtgattggaggccaatgtggagaagttcgattccattctgtttggagaaaagacttgcttgaggacagaggcctgcagggctggctcctgcctttctccattcaaatcttgggccatcccctgggcttggtggctcatacctgtaatctcccagcactttgggagaccaaggtggatggatcacttgaggccaggagctcgaaaccagcctggccaacatggcaaaactctgtctctactaaaattacaaaaaaaaaattagcccagagtcatggcgggtacctgtaatcccagctactagggaggctgaggcacgagaatcgcttaaacccaggaggcagaggttgcagtgagccgagattgcaccactgcactccagcctgggcaacagagcgagagaaaaaaaattggggcggccattcccccatcacccttcccattggcctcctctccagctacagggattttgttcatgtttgttctatacctgggccaccctttctcactcccccttggtcctacacctttgcccagaaaattctcactcaagcatgtctcctcctccaggaagtcttagtagtggagccgtggcaggttcctttatgttctcaaagaaccggcttctctccttctgtgtgcttatctcagctttcaaatacatattcattcacgtgactgttttgctaatgattgtctccccccagtaaacttaaggtccatgacagcattttttccactatatctgccacaccctggggcatagtaggaagacaataaatgttagcaggaaggagggaagaaagggagagagaaggaagaaaaaaaagaggaaggaggaagagaggagaaggagggagggagggaaggaaggaaggaaggagaggaggagagaatgaaggaagaaaggaaggagggagggagggaaaaggaaagaaaagaaaaggaagagaggaagagaggagggaagaaagaaagcaaggaaggagggaggaagagaaggatggagggaaagaggagagaaggaaggaaagaagaaatgaaggaaggagaggagaaaggaaaaaaggaaggaaggaagaaagggagggaggaggcaggagggaagaaaggaaggaggcagggaaggaaaggagaggaagaaggagggaaggagggaaggaaggaagagggaagaaggaaaaaagggagaaaggagaaagggagggagagaatgaaggaaggaaagaagaggagaaaggaagagagaaggaaaaaaggaaggaaagaagggagggagggagggagggagagagggagggaaggagaggaggagaccttctcgaggtcagtcttttgggggtctgatttcacatagacattttccacttctggcctttcaggttctagaaggcctctacatctcatcaatagattcccttagattcacaatgccccatcagttgatacgttgttgaccacagtggactttcatttcatcgttctgtggagaaagggcctggggcaggcaattctgctgaaacctctcttccagctatcattttctacccaagcaccctttcacatactctctgggattctctcactcgttctttcctatctctttcctcacccctttcttgaacacagaaacatgtttgtgactgttcattgcaagagtaaccaccgttgccatttctgcttgttcgtggaactaacacacaataattattcctctgtcttcatctcctgcctcattaacacctcagtgattacaggcatcattaattgctattaggtcatctcatcccacggtggtgtgaaccaggtcctccctgaagacttggcccagcttatggatagtatcggtttatggccacctcctttcctccaccttcatcatgaaaaagatctgcaacacacacaccacgcagcttccaaaacaccagccggctgaccagagacaacctccttgtggacactaaagaggcggttgtcctggggtgtgacgtgggcctttccaggtcacacaaccagctagtagggatttattaggagtctacatctgctccccaggtcacagatattggacatctcaactagggcacagaaagggatgttggagagaaaaggatgaagtcaagaagtatttagggagtaaaatagaatgcttcctagatgacagaaactcttccaagtgttttagatacattaacccctcatcacactccagtaaagtggatattactatcgcttctttacaaataaggaaactcagccaccaaaaggttacataattcagaatttgagtcactagggtcaggaatccaacccagaaagtctgatttcaaaggatacatttttaccgttgtgctgttgtgccttccattcaattatctgtttgccacagaatgaaaattcctcacttgcatttgcatctcttccacctgcacccctcacaccacacacacgcacgtgcacacacacacaatctatagcgacttggtagggatagaagcaatatataaatggtcaaaagatgcaccacatcagagaacgcagatgtgcagccttgcatgctaaggtgagagagggagaactgcctttgttaccaaacctgcttcagttcccccagagcagctttgacaaactcattcattctgccaaactcatgtgagcttctcaggatggacctagagagtagccaaacatttccttcatttctttttcatggatcccatccttgggccataaaggaagggaaataagaagacttgggagttccagagagctgctgtcagagcccagctgcaacgcttgggagccaagttatttaactattcttaaacctcacttttctccatgcagttgcacagctgttgtcgggattagcatttctatgcttaaaatgctctaagtcctcactcttgtaatcccagctctctttgagaagccgaggtgggaggattgcttgagcccaggaggagttcgagagcagcctgggcaacacagcaagaccccttgtctatgaaaaagaaaaaaaaatgctctaagtgaatgaagagcatctctcaatcctgtgacttaggtaagcgaaggtcagtaaaagaatacgtatcgcacctgaaatataggtattctgtattgactgacagcttccgtgtatactttatataaattttgttttgaaaagtgacatgtgtgatatgcattccttgccttgatgataaatcaaccccccttcttcacagagctgagttgcaagaatagttgcaaatgcaatcaagattttcatcccaatacaacaacaactactactgctggtatgactgctactactaaacgtattcgaattttttaattgtgcgtgcacatggcaacagacacccagaaggaacataaaaaatcagatgaagtaaaaaaaataaagaattatcttggggattgcttgagaaattacagctgcacagctgggctctccattgcattgcaagctcaatggcttgcaaaactttcatactttcaggaagggaaggaacacctggggtgcttggatgtcttcccagattgtggagaacaaaatcctgcctgacaagatgctgtctcatcttgtcgctggcccatggattgtttaccccccaaggaagcccagaatgatgaaaagttgccaaagatctttgagcaacaccacctcctttcaacactgtgatgagctttcacttctttaactcccaacaaaagcaaagggggccccagaggtcaggacctgagattcagagagaagcatgggctggtgacatagatgcgaatatggactccaggcagagaaacagcactgtggctaagaagatgaattcatggatgtgcccagggggcaagcatgaacaatttagatacatggccattctctgatggtgtgtgaaggcagaagatattcaccacgactgtgaactctcaggaaaatcatgcctaggaagcatgagcatgttcagtgaaacatatgcacttgctcttctgcaaaacaacccaagagatttgggctgcttggagacggggagccctcacccacattgactttcaggcttaagatgccattgctggttttgtgttttggttttgttttgttttgttttttgtttttgagacggagtctcgttctgtagcccaggctgaagtacaatggcacaatctcggctcactgcaacctccacctcccaggttcaagggattcttctgcctcagcctcccgagtagctgggactacaggcatgtgccaccacgcctgggtaatttttgtatttttagtagagatgtggtttcaccatattggccaggctggtttcaaactcctgacctcgtgatccatccgcctcagcctcccaaagtgctgggattacaggagtgagccattgcactcggcccattgctgcttttttaaatgagtaatagtatttttattttaatgaataatagtattttatttctttttttgaatttgtcaatttttaaattgacaaataataattgtatatatttatgaggtacaatgtggtgttttcacatatgtctatattgtggaatgaataaaccaagctagtaaacatatcatctctccttttttttcctctaataagaatatttaaaatctactcttttttgaagtctagatatcaccaaaaaaaatttaatgtttaaaaattgaaaaaatatagccaggcatggtggcgggcacctgtaatcccagctacttgggaggctgaagcaggagaatcacttgaacctaggagacggaggttgcagtgagccaagactgcgccattgcactccagcctgggtgacaagagcgaaactccatctcaaagaaaaaggaaaaagaaaatctactctttcagcaattttgaaatgtacaatattattaactatagtcaccatgctgtacaaatcttagatctcaaaaacatataagttctagtgctctaaagcactgtggggtgaccatagctaacaataatttattgtatattttcaaatggctaaaggagaagatgttgaatgttctcaacacaaagaaattatatatgtttgagatgatggatactctaatcaccctgattcgatcattgtacattgtttatatgcatcaaaatatcgctgtactccataaatacatacaattattatgtgccatttaaaaataataacaacatagaaagacacctgcctctagtaaaaaattaaaaaataaagctgaggcgggcagatcgcctgaggtcaggagttcatgagcagcctggcaaacatggtgaaaccccatctctactaaaaatacaaaaattagcctcaaaaataaccccatttctactaaaaacacaaaaacacacacaaaaaatccagcctgtcgcccaggctggagtagctgggatcacaggtcaaatactattcagcctttaaaaggaggaaattctgtcatttgccacatggatgaatttagagagaacattacggtaagtgaaataatccagacacagaaaaacaaatactgcatgatctcacttatacatgagatctaaaaaagtccgactcgtgaaagtcgagaggtagaatggtggttgccaggggctggggcaggtaatagggagatactgatcaaagcatacaaaatttcatattatgttcttttgtttttttttttttttttttgagagacagggtcttgttctgttgcccaggctggagtgcagcagtggtgcaatcatagctcattgcagcctcaaattcctgggctcaagcaatcctcccacctcagcctcctaagtagctgggactacaccactcctggctcatactgtattcttaaggaaggacgtggtattatttccagtttatatctgtagagcatctgtagagtgaaggggcagaagcatcaattctgacaacttcaggcctttgctcccaatgcacattgaacatttttcatgtgtcatgctgggtgctgcgtaaacacaacatgcatggctcacactctcactggctgactgtctttgggagaaagaagatatcaaaggagatttataagagtaaaatgacttcccaggagaagtgcaggcagccacagtaatttggaaccacctggtccatgaagcgttcagcagaagcttcctccagaagcttcgttttacttgagatctgattaatcttttttgtttttttgtttattttactttaagttttagggtacatgtgcacaacgtgcaggtttgttacatatatatatatgtgccatgttggtgtgctgcacccattaactcatcatttaacattaggtatatctcctaatgctatccctcccccctccctcccccctcccccaccccacaactggccccagtgtgtgatgttccccttcctgtgtccatgtgttctcattgttcaattcccacctatgagtcttttaacaaccaagagtccttgtgtcactctccagctctgaattcctcaatggctccccattgcctatttggatcagggaccaccttattcactttgcctaggacttccctggcttcttagcagtgaaatccccacatgccagaaaactctgcagatctgggcaaaccaggacggttggtaaccctacaacccaaccaaattcagactcccttaaagtgacttcaagccccttcatgatctcaccctttcctggaatcacctctcaccatttggactcacttcccatcaccaggactcatctctcaacaaagggactctcctctcatcactgggctcacctctcaccaccagaactcacatctcaccacctggactcactgtcacctcctggattcacccatctggactcacctctcatcacctagacttatctctcaccccctggactcacctctcaccaactagactcatcccttattacctgtactcatctctcaccagctggactcacccacctgggctcatatctcaccacctggactcatctctcactacctggactcacctctcaccacctggactcacatctcaactgaactcatctctcacaacctggactcacaactcaactgaactgatctcttaccacctggactcacctctcaccacctggattcacctctcaccacctggactcacctctcaccaactggactcacctctcactggactcatctcttaccacctggactcacatctcaactgaactcatctctcacctgaactcatctctcaccagctgtactcacttctcaacacctggactagcccacctggactcacctcatctctcaccttctggactcatctctcacctggagtcacctcttaacaccgggactcacctctcacctggacttacctcccaccacttggactcacctctcaccccctagactcacctctcacaccctggactcatatctcaccatctggactcacctttcacctggactaacctctcaacacctagactcatctctcaccacctagattcacctcgcaccactcggactcatctctcacaacgtggaatcacttctcaccacctggaatcacttctcaccacctagactcatctctcaccacctagactcatctcccatcacctagactcatctcccatcacctgaactcacctctcaccacctggactaactctcaccaccactgtctcttacactttattctctggccatgtggaaacagacatggtgccttgcattcaccaagctcactcattcacctctgctatttccccatgttgggacccctctgcactggctacctctcccacatgcccacctgaaaagcacctactcattcctcaagtctcaggtgacatatacctcctctatgaagccaacttgtaaccatgtaaccactttgggagtcaatgcatgcattcctccatggagtccttacaccaggttgcctttcttggaccagccagttgccagataactctgattaatataattaatcaatttaattacttaattagttaactcacaagtactccagcccatggtgacgcattctctcacatactgatactgtgtaaatatgtgtctcatcagaggagacaggatctcccgacatttcatcatcattggactgaggagaaattcatgaggaaccatctctgccaacctccattttaggagacaaaactaaactgggcatcccagtacactcatccacccagttcttccttcttgggccctcactgtgtgcctggttccaaatgaaacactcaagcacagccttcaacccaagaactgggcagtctaaacccacctgcctccacacaggggcaggggctgcctcagaaatgccctttcaatcctgggctaatccaaggctagttcttcccaactctgcattcagtgatgccatgtttgtaacttgaaatcagctacagcaagagtgaatacatcatggaaattagcaacattacaaatgaggacattttttgctttttattgtttgggaggttttttcattttccttcctttttttttttttttttttaacggagttttgcttttgtcgcccaggctggagtgcaatggtgcaatcttggctcactgcagcctctgtctaccaggttcaagcaattctcctgcctcagcctcccaagtagctgggattacagatgcataccaccacacctggcacatttttgtatttttagtagagatggcgttttatcatgttggtcaggctggtgtcagactctgacctccaatgatccgctggcctcggcctcccaaagtgctgggattacagatgtgagccaccacgcctggccatcctctttattttttaattgacacataataattgtacatattcatggagtacatagtgatgttttgaggcatatgacatacagtaatcagatcagggtaattgacatgtcaatcatctcaaacacttatcatttctttgtgttgggagcatgcaatattctccttctagctgtttgaaactatgtaatatattattgtttactgtagttaccctacagtgctgtagaacactagaacttattcttcctacctagctgtattttttggtggggagatagagcgggggacaagggcaagtaaaaatgccataaaatgtttctaccattttgaagttacctttatctttctttttcaatttttattttaaattcggtggtacatgtgcatatttgttacatgagtttattaatccatttttatactctataaagaaatacccaagactgggtaacttataaaggaaagaggtttaattgacttacagttccccatggccggggaggcctcaggaaacttacaatcatggcagaaggggaagaagcacgtcttacgtggtagcaggagagagaagtgaagagcaaagtgggaaaagccccttataaaatcatgagatttcaggacagctcactcactatcacgagaacagcatgggacaactggccccatgatccaatcacctcccacgatgtccctcccccaaacctggggattacaattcagattacaattcaagatgagatttgagtagggacacagagccagaccatatcagtggctacactacatgatgctaaggtttgctgtatgaatgatcccatcactcaagtagtgagcacaggacacagtaggtagtttttcaaccctcaccccctctcctgccctcctccctctagtagtcaccagtgtctattgtttccatcttcatgtccacgagtagtcaatgttttgctcccacttataagtgagaacatgtggtggttggttttctgttcctgcattaattcacttaggataatggcctccagctgcatccattttgctgcaaacgacatcattttgttgttttctttccttttcttttcttttttctttcttttttttttttttttttttgaggcagagtgttgctctatcgcccaggctggagtgcagtggcacggtcttggctcactgtagcctctgcctcctgggttcaagcaattctcctgcctcagcctccccagtagctgggattacaggcatgcgccaccacgcctggctaatttttgtatttttagtagagatgaggtttcaccatgttggccaggctgttgtcaaactcctgacctcaggtgatccacccacctcggcctcccaaagtgctgggattacaggcatgagccacgcaaccagccatgattttgttattttctatggctgcatagtattccatggtatatatacacacaccatatatatatacaccatatacacacatacacacacacacacacacacacatatatatataacacttttctttatccagtccactgttgatgggcgcctaggttgattccatgtttttgctgttgtgaacagcactagctgtaattttgtatcctttaacaaatctctccctatcctctcttccccctaccattcccagcctctaacatcctctgttccactttttgcttttacaaaatcaacttatttagcttccacacatgaatgagaacatgtgctgtttaactttctgtttctagcttatttcacctaacatactgtcctccagttccatccatgttaccacaaatgacaggatttcattctttttatggctgaatagtattgggggatgttgatttgttgtggttttttggcttcattttgtcttgtttttagagagcgaagtgttagacatcttccaacacatcattgcaaacactccgagtcctgactgattcccctaagatccaactttcttaacggaccagaccctgtcaaacaatgagatttcaaggaggaagaagacagcaaaagcatgctttagctaaaattttggcatggggtaagtgtaggatgttatgtccagtttaatttggtgttttcctgggttttgtttctcttttagtgaaaagtgtgtactttttatgccattgcagaattgattcaatagcaccactgaattgtcggtcacgtggatatgttcagtttgaaaaaaattatcaagctgcacatttaagagttgtgcactaggccgggtgcggtggctcatgcctgtaatcccagcactttgggaggccaagagggacagatcacgaggtcaggagttcgagacaggcctgaccaacatggtgaaaccccatctccactaaaaatacaaaaattggccaggtgtggtagtgagtgcctgtaatcccagcaactcgcgaggctgaggcaggagaatggcatgaacccggaaggcagaggttgcagtgagccaagatcacgccactgcactccagcctgggtgacagagcgagactccgtctcaaaaaaaaaaaaagaaagaaaaaaaaagagtcgcgcacttttcttcacataggttattctcaatagttgtttaaagaacacaaaaaaattgagtttgttccatatgtgctaacatggaaagatgacccagacataattcggtgaacaaggcaagtaacaggacaattttgtagaacgggcccacctatgtaactaacactgcgaatgtgtgtaagtcaatgcggcaataggcactgaagggaaattgctcagtcttgtgcctgggctacctggaagcaaagggaagaattggaaggatgagaacaggccagttttgctaaaaaaaacatttctgtattgctagaaagttgcactactaggaatggaattaaaacatgcatcaggctaagcgtggtggctcacgcctgtaatcccagcactttgggaggcccaggcaggtggatcgttttcagctcaggagtttaacaacagctgggcaacatggcaaaacccagtttctacaaaaaacacacaaaaaattagcctggcatggtggtgcacgcctgtagtcccagctactggggaggctgcggctggagaattgcttgagtccgggaagcagaggttgtagtgagttgagatcataccattgcactccagcctgggcaacttagtgagaccctgtctcaaaaaaaaatccacataaaacttgtacataaatatgtataacagcatccttcaaatagccaaaagcctaacacaactgaaatgttcctccacagatgaataaataaacaaaatgaggtatatctgtacaatggactattattcagtcagaaaaagggatgaagttctaatatatgctaccatgtggatgctatcttcctcctccttgaaatctcattgatttataggatctggtcagctaagaaggctggatcttaggggaaggaattggaatgggagtgtctgcaatggtttgctgaaagacatctaacacttggctctctaaaaaccaaaacaaaatgaaacaggagacaacaaaccaacatccctgcaatactgttcttgaaaacatcatgctgaatgaaagaagccagacacaaaaatcacatagtgtatgattctatttctgtgaaatatccagaacagggaaacctgcagagacagaaactcggctagtggttgcctaaggctgggatgtatggagagattgggagtgatagctaaagggtactgggattcttttggggggtgataaaaatgttctaaaatgagccaggtgtggtggcccgcgcctgtaatctcacactttgggaggccgagtggggaggatcccttgaggccagaagttcgagaccagcctgggcaacacagcaagactttgtctctacaaaaaatcttgaggaaaaaagtagcaaggcatgtacgtgcacacctgtagtcccagctgcccaggaggctgaggtggaaggatcgaataagcccaggagttttaagctgcagtgagctgtgatcgctccactgcactccagcctgggtgacagatcttatctccgaaaaaagaaaaaacaaaatgttccaaaatgaactgacgcaatggttgcatcactgtgaatatattgaaacccactggattgcacacttcaggtgggtgaattgtataatacgtaaattatatctcatttaagctgttgctatcgaaccgagtttgttcttcctctgtgcagcaagccaatcaatgtaatgacagattttgcagaagaggaagagttcgttcatgaggcaattaagcgacgaggtggtaaaacaggtctcaaattctcctccccaaaaatagggtttgagggtgcttatgggatagaaaacggggtgatctaaagtacggagaaaggtgactggcaggtagggaaggtgaggtaatcagaatttctgagcaagcatggttgagctacatggctttagataggacatttgtgcaaaaaatagcatttagcatgatctgaaggtggagtttacggccctctgatatcagctacccacataggtgcagttgaagggtcagtgatctccactggcttaaactaaacaagagctgcctcctacctagttcctgaaaaacaactttaagcacccattactatagtgtcccacagacaaaaatgttatctgtaaggaagccagtgggagtttagttatgcattatttggctacgtgacttgctagtggcgcttttaagatcaactataagtaagcaattaaaagtaagtaagcaattaaacgcaaggcagattaagtctggagggcttaatcaggttcgcctttggtttcactattaacataagaaataaaatgaaacaaaatggctgaaaaataataagaggaggaggaagagaggaatcatcatgatgcatcagttaaggcaactgggctggaacattttaggggttgtttgtttgtttttatatttaagacagagtcttgctctgtcacccaggctggagtgcagaggcacaatcttagctcgctgcagcctcaaactcctaggctcaagccagcctcctacctcagcctcctgagtagctaggactataggtatatgccatcatttttattattattattattttagtgacagggtctcactatgccccggctggtctcaaactcctcacctcaagcgatcctcctgccttggcctcccaaagcgctgggactacagacgtgacccaccacacctcaccccttatagggttgaatgccaactgtgccaattgctgaccttgggcagtcatttcacctctatgagcctcagtttctccatctgcaaaatgggagcaaaaatactgatctgtctagactcttgaagactcgatgagataataactaagtgaagtcggtgttatctacacagtggaaggtgagatgaataaactaggcataatgatgatggtaataaccagatgggctggctatgggatgggggttgggagaggttgtggctgggctggcacagacatctgactcatttagactctctgcctaggccacctttgccagagggagtcccctcagccttgcgatcactcatcccattggcgttggctccatttccacaccacagctgtgtgccaagggtgtgtcatgaggtttcttgagtgacagaaaactcaccgacaataaagggccaggtgattgtgccacccgattcatagaccaggcttctcaggagaaaccccgggagattccacactgtcagccccttctccaagatcagtacgtgggcctgactcctcctcggtgcccagctcagtattggcaactaggagagtagtgagattgaacttggccttgaggaacagctgcctctagagttggtaagtgatttggtggatattagcctctctctctctctctctctctctctctcacacacacacacacacacacacacacacacacacgcacatacacacatacgctccctctcccttcatgaattaatgctctggccagttttggcagaatggaagaaatttccatccatcccctctttcttttcatctgttcatttttttcttatttgtttactcagcaaattctctccaacaccacctctgtgctccctgccacactgttggccatgatggagacagagataatgaagtcaggctttcagtcctgaaaactgagctgccagttcagccatgagagtaagaatcaaaaacactgctgtaattcaagtaggagcaagcagagctgtgagagtccagagaaggaagaggaaagttccaggaggtcaagagggatcctaaaacctacctgggtcaccattgctgttaagcacctagagctctccccaggtcctttgcggatgggaaaatcgagtctcagagaggagagtgagatgccgaaggtcacacagctgggaagggactgaggcaggattcggttctggctccagggctatgctccttccacttcctccctcacaatctttggctcctctttcgtcacagcacttgctgtgtgtgtgtgtgagtgtgtgtgtgtgagagagagagagagagagagagatttaatattcatttctgtcacagactagagctacagaaggacagaaagtcagggagcatgtctgtcttacttaatggattctaagtgcataacacataatagatacccagaaaatatttgctgggtaggtgggtgggtgggtggatggattgatggatggatggatggatgggtgggtgggtagatggataagtaaataggtggatggatagatggaagatagagatgatggatgaaggaatggatagaaggagggctagatggagggatagttggaagatagaatagatggagggatggaagacagagagagataatggatgaatggatggatggatggatgaatgaatgagtggttggatgaataagtggatggatagatagatggatgggtagataaatgggttgatggaagaatgaatgggtatatgggatgactgattaatagatgggtagacagacggatgaatagatgtgtgagtgggtggatggatggatggatgagtggatagataggtaagtggaaagataaattggtggatgggttgatgaataaaaggatggatgttaaattggattgatggatgactagatagatgtgcgggtggaaggatgggtggatgggatgactgattaatagataagtagatggacagatgaatagatggaagggtgagtgggtgaatggatggatagatgatgaattaatggatagatggtagatggatagatgaatgaattgatgggtgactggatagatagatggataaaaacatagatgaatggatggttgatgggggaaggcatagcagatattatgccaccaaaattgtcagagaaggatctagatagaaaaaaaaaaagcattcccggtggggtgcagtggctcacatctataatcccagcactttgggaggctgaggtgggcagatcatgaggtcaggagatcaagaccatcctggctaacacagtgaaatcccgtctctactaaaaatacaataaaattagccaggcatggtggcgcatacctgtagtcccagctactcgggaggctgaggcaggatcatcacttgaacccaggaggcagaggttgcagtgagccgagatcatgccactgcaccccagacagcctgggtgacagagtgagattctgtctcaaaaaaaaaaaaaaaaaaagcaaaaagcattccctactgaggagaaagtgtaggaaaaggcaaagagatggggaaatgccaagagtatgacaaaagtctgtctgtgcagccagagaagagaacaggactcagagatgagaatggagaatgtggacagacattcagactcaaggaagagcaagggaggtggattgaccccttcgtattggagacccagtgagataatatcaaagttgcattccccacttcgatgacattctccttttaaacactcctccaaggcatctctttgagatggcttccccagcccgtcatctcctaggtagaagaggcaaacacatgggtcacttgccctgctcctcattccagggctttcaggggaagttcagtccaccagaagctggtgaatgacccacgggagacacaggaagtttttgggggcggagtgggggacattgtggggtaggctcagcagttctgaagaagacatccagaaatggaagacatcgtgaaattgtcattctaggggtgatatattactacttcatggattatcatctattgcccagatctgtccacagaccaaatccccaccacttgagtgctatttggtctcaaaaatccagatacataagccagtttgtcccctgagcccctcggcctccctttagagaactttaacctatcttctcttgactccaaggatcagacaagggtgctgagagccgggactcacaaccaaaggagaaatgagcaatccgcggtctttggaagaggtaggctgggtgcaggttgaggggagggtgatcatctggggagaaggaaggtgaggattttaatgttttggaaagagtggagggactgaaaaaatcatgatctgaactcagagctaggaggtactttgtagtcaatcaaacagcaaaaaaagactcagagatggaaccgaagttgggttgggtggtgggggcagtcaaacacagctacctctgtctccaaagatcaagttcttctcaacacattaaaggttctgagaagtcctgcaataaacaatttcatgttgattttttaaaagatgaagttcttaccactggggtgctcagtacgctgcttctgttctggaaagaactgttgacccccaatattcttcttcctcagacgggatctcagtattagcttcagaaactctgagacctctgcaagtgaggaggtaatagaggaatgctcagaacactcttggggaggatgaggagacctgcaaatccacaaaatacgacaactggaagggatcttcaaaatcacacacacactcattgtctatatttggaaactgaggctcagatgggagcagtgacttcccccaagttcataccaagctagaaaagagctggaccccaggttgggttgctgtatttgggaactaaaaataaaggacacccaattcaatttgaatttcacatcaacaacaaataattatgtagtataagtatatcccatgcaatatttgggatatacttatactaaaaaggtatttggtttttatttgaaatttaagtgtacctgagcatcttctattatacctggcaaccctaagcccaagcctctcttgttttgtttgttcatttttgagacagggtctcacttattgcccaggctggagtgcagtgacaagatcatagttcactgcagcctcaacttcccaggctcaagctatcctcccacttcagcctccaaagtagctgggaccacagatgcacagcagcacacccagctatatttttcattttttgtagagacagagtctcactatgttgcccaggctggtctcgaactcttgggctcaagcaatcctcccacctcggcctcccaaagtgctgggatcacaggcatgagccaccacacccagcctgcatgcctcttttgactacatctgcttctccttgaacctctccatgctgatttctgtcttctcttggccccaggagaaatatgatatgtcaggtgcccgcctggccctaatactgtgtgtcaccaaagcccgggaaggttccgaagaagacctggatgctctggaacacatgtttcggcagctgagattcgaaagcaccatgaaaagagaccccactgccgaggtattggggtgcctactccaggcctgtttgggggaaaggtactaggttggaagtgtaggctatggggacccagctgagtctggttcttcctctcactccagcaattccaggaagagctggaaaaattccagcaggccatcgattcccgggaagatcccgtcagttgtgccttcgtggtactcatggctcacgggagggaaggcttcctcaagggagaagatggggagatggtcaagctggagaatctcttcgaggccctgaacaacaagaactgccaggccctgcgagctaagcccaaggtgtacatcatacaggcctgtcgaggaggtggggacagatccaagagcacagagtctgtggtttgttgtttctgttttgttttttgagacagcacccaggctggaatgcagtggcggaatctcaactcactgcaatctccatctcccaggctccagccgtcctcctgcctcagcctcctgagtagctgagactacaggctcccgccactatgtcaggctaatttttgtagacagggtctgattatgttgcccaggctggtctcaaactcctgagctcaagcaatcctcctgcctcagcctcccaccatgcccaaccaagtctgtgtttttatccaagccagtcccagatccaaagccccagctgaagccaggcaccatggctcatgcctgtaattccagtactttgggaggcccaggcgggaagattttttgaggccaggagttcaagactagcgtcgagcaatgtaacaagaacccagctctatgaaaaatattaaagattagccaagggcatggtggcatgggcctgtggtcctagctactcaggaggctgaagtaggaggatcacttgagcccaggagttaagaggctgcagtgagctatgattacaccattgcactccagcctgggcaacaaagcaagcccctgtctctaaaaagttaaattaaattaaaaagccccactgcacatggcataccacaaaagcatcctttttttttttttttttttagacggagtcttgctctgtcacccaggctggagtgcgatggcacaatcttggctcactgcaacccccacctcccaggttcaagcaattcttctgcctcagcctcccaagtagctgggattacaggtgcaagccaccatgcctggctaatttttgtatttttagtagagatgggatttgaccatgttggtcaggctggtctcaaactcctgacctcaggtgatctgccttcctcagcctcccaaagtgctgggattacaggtgtgagccaccgtgcccagcccttacctttctttttaagaggcgacatctcgctctgtctcccaggctagagtgtagtggtgcaatcatggctcactgcagcctcaagctcccaggttcaagtgatcctcctgcttcagccccccaaaacactgggaatacaggtgtgagccaccctgcccagcccctttccttacctttctctctgactttgcctcctcctcttcttgttgtttcagaacaaagggaccccggtgaaacagtaggtggagatgagattgtgatggtcatcaaagacagcccacaaaccatcccaacatacacagatgccttgcacgtttattccacggtagagggtatgagctcccagctggcccagggatccctctgctcttccccctctcctgccactcccaactcctgaacctctcctccaggacccacgcccttccaggatcccctctacctaccctctgaagctcccccgaacccacctctctggaattcccaggatacatcgcctaccgacatgatcagaaaggctcatgctttatccagaccctggtggatgtgttcacgaagaggaaaggacatatcttggaacttctgacagaggtgagttgacaaaaggtagctgggaccaccgcccaggccaagaagggtgcaggcggagggggctgagcctcctcctaacccctctccatttccctcagctccaaatccaagccagatctcaatacagaaactaagaagcccactttccaacaactttcccaaatgcagggactcttaaaagccacagtatgggagataaatttctataaacaaatcccccttggatataaacaatgtttgggcaaactgttttcttttaatgtttatatgtttttattgcaaattatttaaaaaatgcccagccaaggattccatacaaactatggtataggaagaggccacaacggtctctcatcttaggacaagaatacccacctgccccgttccctaaccctccccccataagtccatgacactgactcctccaagctcaccacacctgttgctgcaggtgacccggcggatggcagaagcagagctggttcaagaaggaaaagcaaggaaaacgaaccctgaaatccaaagcaccctccggaaacggctgtatctgcagtagaagtagaaagaccaggaggagctttccttccagcattctttctgtctcacagaaatttagaggcagctcttacctctccccaagatcttctgttcccaaggccaaatggcacccagtttcttttccatcacacccttcatgcaggtcctcctgtccttattagagcaagccagccaaaacttagcacaaggcatggtggcaacattaacatcacctccctcaggctggactttctatctttattaatgcaaccgaagagacctaagagtgcattcacttatcccactttctgttcctgtggtcttctttctcccatgaagcagaaactggataaagctcaagattttccatagacaaaccaaagcccactcatcccctcctaccccaatccaacctctgctggctcctgcatctcacttggaggtcaaacctcctcctgaggccaatgcattcccaacttccagttctttcctttaccctggagagttagtaaggtaagaaccattctttctctccaaaaccactcctccttggctggcaagttggtgtcctaactccgttctcttcctagctcatggcctctctagataataaagttgtctcctcctttctggatctcttcctcctaacacccctcccctgaaaccctggactctgccctctctccaagaaaatccatctattcaactattcttgcattcaattactctaaatgagagcgtgttggagctatggcaaattccctgttgtcaccttgctattttgcagacaacataatatttaacctctcataaccagagaggttaaataatttgtcaaatgcaatacagtaagacagaggcaaggacaaggtttgacttccagcccagcctcttttccacaacctgctaaatcctgatccatctgaaaacttttctaattagtgaagatgactaataaaaattttccctatctccaaggtaggagctttctggaagtttctagaaattttcaataaccaccagccaaggttacctccaggtaaccttgcagcaccaggctggaagtcagatcggcttcactatcttccaactctacagcctgtatctctccatccccagctttgacctttcctgctcaagtaacctacgggcacatccagcgtcactaaaaactcagggcttttcttcccggttactcctccaagcgttccctggtatcctcaacctcagatcccaggttcagatttctgcagtcaatctatgacccctctcttcttgcatccttcatatgccaccagacaccatgcccagtccagcctgattttgaaacaactttcatgccggtcttctcttccctgacatgttactgtccaggctcaagtcctcagcttctcatatctgcatctttgcaaccaacttcctcccttgcctctctgcttttccatcccacttttcatgtgtcctccataccatctataacagtgatctccctggaacactcaagaagacacaacataccatattatttaaagaccagggtactggacagtggctcacacctgtattcccgactttgagagtctgaagcgggaggatcacttgaggccaggagttaagagaccagcctgggcaacacagcaagaccctgtctctaaaaaaaaaaattaattaactgggtatggtggcacatgcctgtagtcccagctactcaggaggctgaggtgggaggatgacttgagcccaggagtttgaggctgcaaggagctatgatcatgccagtgcatcccagctctaggtgagacagtgagatccggtctccaaaataaatcaatcaatcaaataaagaccaaagtcaaaccgcacatcaggatctctcacacccttccaattttgccatctaccagcacttagctaaacccatctcccatctcttccaccatgaattcactctttcaaaaaggctaatgtcttcttactcacccttgcctctaagcctttgctatcaccatttcccccaagctggagggccctccctctccctttacccctcttccactacctcccacccctactttttccagaaagccatttcctctcttttttctgattgatccttccctctcacccaggattagatgctggaaatgaccacttctggagggcagggaacaagcccttaatctgcataatgagtgttcaataaacagttgtcaaactttgaaagaaagtgttgaaatctttgttctgtgctgaaacagtgaggctgatacaaaaggagttatggatttaatttcttttttcccagtggctggcttcctcccaggtgtgtctatcatgaatggagaatcaggagcttcagcctgtgtcttctttccttttttttttctttaagagatgagatcttgctctgccacccaggctggagtacagtggcaccatcatagctcactgcaccctcgacctcctgggctcaagcaatcctcccacctcagcctctcatgtagctgggactacaggtgtgcatcaccacacctggctaattttcttatttttcggtagagattgggtcttgctatgttgccgaggctggtctcacagtcctggtctcaagcaatcctcttgccttggcctcccaaagtgctgagattacagatgtgacccaccacaccgagctcctgtctctttcacaaaaacagacgtgttgggaatttgtaaagttacaggccacactttcatgctgaatggctatcttttacataattgttccatctccagaatgtttccaaggaagtatgcagacagaaaaatgtcacttttcagaactataagggacattggaggtgggctagttacagcatcaaagacatttagcaagtgtgccatctctctagcctggtgcccatggcagacatgactaatcaatcacacctatttttcctaatgaactcaagtgttacctcaaagcctttctcctctgagcacttgggaagctgacacctgtctactggcataagtacatcattcctgatccatttgaacctccaccttaggaagtcaatcgtctatggtcattttatgtggtacacccaggaatctagccatggcagtaaccggggttttatccatggagatggaaaaccaagtggccaacacaggggtgggttcgaagggccaagagatctggggtgatgcatgcactgagctctatacacttacttacatgccaacctgcggtccaaacacccaatgattctgggagtctccaaacatgagggtcagaaaactgtgtctcactcaccagatccagtctgcagtttgtttttatcaacaaagctttgctggcacacaggcatgtttattcacttacatactggctacggctgccttcaacctacaatggtagagttgagtagttagaacagacagcatatggcccacaaagctgaaactatttactatttggccccttacagagaaggtttgacaacccctatcctaatatctttccaaaaattccaattttgctatcaatactaattttgatgtcaatgacgtatcacctcacacctgttgggatggctattatcaaaaagataggagataagcgttggtgagggtgtggagaaaagggaacctttgttggtggaaaatagaatggtgcagccattgtggaaaacactatggagattcctaaagaaattaaaaacaggctgggcatggtggctcacacctgtaatcccagcacttagggaggctaaggcgggtggatcacttgagggtgggagttcaagaccagcctggccaacatggtgaaaccccgtctctactaaaaatacaaaaattagccaggtatgttggtgggcgcctgtaataccagctacttgagaggctaaggcaggaaaatcgcttgaacctgggaggcggaggttgcagtgagctgagatcgtgccactgcattccagcctgggagacagagtgagacgctgtctcaaaaagaaaaaaaaaaaggaagaggctgggcgcggtggctcacacctgtaatcccagcactttgggaggccgaggtgggcagatcacgaggtcaggagatcgagaccatcctggctaacacagtgaaaccccgtctctactaaaaatacaaaaaattagccgggcatggtggcgggcacctgtagtcccagctacttgggaggctgaggcaggagaatggcatgaaccctgaaggcagagcttgcagtgagccgagatcacgccactgcactccagcctgggcgacagagcaagactccatctcaaaaaaaaaaaaaacagaactacaaaataatcaagtaatcccactcctaggtatatatgcaaaataaaggaaatcaatatatcaaagagatatctgcactgccatgttaattgcagcactattcacaatagccaagatatagaatcaacctaagtgtctatcaatagatgaatggataaagaaactgcggtatatatgcacaatagaatactattcagccataataaagaacaaaatcgtgtcatttgcagcaacgtggatgagcctggatgacactgtattaagtaaaatcagccacgcacagaaagacaaacatcacatgttctcactcattatctggaagctaaaaaagtagatctggtgaagatagagactggaatggtaattaccagaggctgggaagggaagcgggcagaagacgtgaagagaaatgggttactgggtacaaaagtacagttaggtaggatgaataagttcttgtattcgagagcacagtaggaaaattattattaaccgtaattatttgtatatttcaaaatagcaagaggagaagaatagcagtgttcccaacacaaggaaaagataaacgtttaaggtgatggatatctaattaccctaatttgatcaccaccccaaaaatctgtacaactatgatatatcaaataaaaaaacagaactgtccaggcatggtgactcacgcctgtaacctcaggatgccaaggcgggagaatcacttcagcccaggagttttaaactagcctgggcaacaaagtgaggcttagtctctactaaaaaattttttttaattagctaggtgcggtggtgtgtgcctgtagtcctagctacttgggaggctgaggtgggaggatcgcttgagcccaggaagtcaagaccgcagtgaaccgagattgcacctctgtgcgccagcctgggtgacagagcaagatcctgtctcaaaaaaaaaaaaaaaaagaaagaaaagaaaaaaaaaacagaccaccatatgacccagcaattagactttttggatatatatccaaaggaaatgaaattaaatctagtaaagatatcttcactcccatggtcattgaagcattattcacaatagccaaaatgtgaaaaaatcgaagtgtccatctacggacgaatgaataaggaaaagactgtgcgtgcgtgtgtgtgtgtgtatgtgtctgtgagagagagagagagactgtgtgtgtgtgcatgtgtgtgtgtgcgcacacaatggaatgttattcagctttaaaacaaataaataaatgagattctgccgtttgccatcacatggatgaacctaaagtatattatgctagatggaataagccagcattgaaatctaccgttgtattagtctgttctcgtactgctataaagaaatacttgagtctgggtaatgttcaaagaaaaaaggtgaaggcaggtgccgtggctcacccctgtaatcctagcactttgggaggccgaggtgggcggatcacttgaggtcaggagttcaaaaccagcctggccaacacagtgaaaccctgtctctactacaaatacaaaaaaaattagctgggcatggtggcgcatgcctgtaatcccagctacgcgggaggctgagatgggagaatcacttaaacccaggaggcagaggttgcagtgagcactctagcctgggtgacagagagagattcggtctcaaaaagaaaaaaggtttaattggctcagggttccacaggctgtacaggaagcatggccggggacgtctccggaaacttacaatcatggcggaaggcgaagagaaagcagacacgccttacttggctggagcaggcagaagggaggtggagaggtgctacacacgtttaaacaaccagatctcgcggtaacacactcactagcacaagaacggcaccaaaggagaaacctgcccacatgacccaatcacctcccaccagatcccacctccaacactggggattacaatctgacatgagattgagcagagacagacccaaaccatatcaatggctttgttcttcaagacctgcgactaaaggttttccccaattattaagcaaggatgtgtaggtttagcctggaagtttcatattcagcatcaggaactgatccaggctttgtaggacctgtacagttgggcagaaagagtccctctttaagaagaggacaaacagcaacgcagaattagtacagccacataagcacattgtcagggtctctcctcggaccatgcagaggcccagaaaagtggggatcctgtagcttttgccacatcagctccaaggcaagtccccctttgtttatctgttctccaagacgctctccgatagcagcagaaacagtcgttttaaaatgcagatctgagccgggtatggtggtacgcacctgtaagttccagctacttgggaggttggggtgggaggatcacttgagcccaggaagtcaagactgcagtgagctatgattgtgcattgcagcctgagcaacagaactatctctaaaagaataacaataataaatgtgaaataaatctttgaaaatgcaaatatgacctgctgtgcatcttcttaaaatctttctgtgacctcccactgcccttaggataaggaaaaaagtcttaacttctagatccctacatctttttatctctactccttcagtgtttcttttttttattattattatactttaagttttagggtacatgtgcacaatgtgcaggttagttacatatatatacatgtgccatgctggtgcactgcacccactaacttgtcatctagcattaggtatatctcccaatgctatccctcccccctctcccctcccccctccttcagtgtttctgaagtcactttggacttctttcttttccaagataggctatttcctatctcagttacctctacttagatcactcctccaaaccaccttgttatcctttatactgtagctcaaatacatttctgaagggaagtctctttgtccatcacctcagacaagacccgagtttagagttctttgtagactttttctccaagccacaaatcacactttaaaattatgtcttttgcgatatgattatttattcaaaatctggctcttctacctgatggatccaagattaaacatcaattgtcataagccagtgagctttggggtcatgtgttactgcagcataacctaatctgtgctgactgacacatgagaccagccaggttaaaacagcacattggaatgaatgacattcattctaccagctacctaggaaatgtacagaatctatgagataaaaataaatccacttcttttacctatgagcagtttctatttaatcatgtttaaattttattcactaataagaatgaataagcaatttccaaaggttccaaagtgtagcacccagtttagcatgagacacaagaaaaggaaagggagttctagctttgagaatttggaacctgaactcttcaccttcattctgattggtcgggttatgtgggaataaaatatgtcggctgtttgtgaagttgctcttacagatgatcaattataagaatgaggtcaccttcaccctggccaattcagtaagccaatcaccctattgctgtgtatgctcacccacagtccatacccatggcctcaaggctatcttgatacacccagttggcttgctgttagcttctgatagtacaagtcacaagagagagagagaaaatgggaagaggacaaaaaaagaggattcttccttttggagttgccagtagcatcacgtcattccagtttgcaacttttttgccccacacacaaaaccggcatcattgtgccccctgaaatatacgtgcatcagctggccagcagccccgtctcagatatatgcacagatatgcacatggcactgtcttcttcctcttctaagattctagagtctgataacgtcaactcttcccagcgtttcccaggcctcagcttgtcagctgattccacagaaattatttctgggttagcactagtgttaaccaggtccttgttaactagtcttgccttcttgcttttctggtccttcactacctatttaattaattcccatgttaaattctttctgttaaaagacatcagcagatgattgggtaatgaaaatatggtatatatacagaatggactatgattcagccataaaaaaaaaaaagagtgaaatcatgtctcagaaagtcaaatagcacatgtgtattagtccatcctcattctgctaataaagacatacccaagactgggtaatttataaagaaaagaggtttgatggattcacagttccacatggctggaaaggcctcacaatcatggtggaaggtgaaggaggagcaaaggcacatcttacatggtggcaggcaagagagcgtgtgcaggggaactgccctttataaagccatcagatttcgtgacacttattcactatcacgagaacagcatgagggtaactgaccccatgattcaattaccccccaccaggtccctcccatgacacatggggattatgggaactacaattcaagatgagatttgagtggggacacagccaaaccatatcaacatgttctcatttataagtgggggccaaataatgtgtagacaaggacatagggtgtggaattatagacactggagaggcagaagggtaagagagtaggaggagatggaggatgagaaattactttatgggtacaatgtaccttgtttgggtgacggttacactcaaagcccagatttcaccactaggcaacacatccgtgtaacaaaactggccttgtactccttaaatttatgcacttttttttttctttgagactgagtcttgctctgtcaccaggctggagtgcagtggtgcgatcttggctcactgcaatctccacctcccgggttcaagcaattcccctgcctcagcctcccaagtagctgggattacaggcacccaccaccacgcctggctaattttttgtattttagtagagacgaggtttcaccatgttggccaggatggtctccatctcctgacctcatgatccacccacctcagcctcccaaagcactgggattacaagtgtgaaccactgcacccggccccgtgcaaaattttttcaatggtagcttctggaaaatgtcatctataagaaactacaagtagaacacaaataaatgacagaatatgagctttcggtgtctacattccgtaaatctagtaaataataaatattaacatacaggccaggtgtggcggctcacatctgtaaacccagcactttgggaggctgaggtgggcagatagcttgagctcaggagtttgagactgcctgggcaacatggtgaaaccccatttctactaaaaatgcaaaaacaaatatcctgggatggtggtgcatacctgtagccccagctactagggaggctgaggtgggaggatcaccttgatcctgggaggtggaggttacagtgagccaaaatggcactactgtactccagcctgggtgacagagtgagaacctgtctcaaaagataaaaaaataattaacatacaaaaaaattctctctgttaaaatatctttagtcctcccacaacatggataaaccttgaaaacgttatgttaagttaaataagccagagacacgacgcacaaatattgtatgattccactttagaaggtacccagaataggtaagtttatagaggtggaaagtcgattagaagttttcaagagctggggataaggaggaacagggagtgattgcttaatgagtttgagttttatctggggggtgatgaaaacattttggaaatagtggtgatggctgtacaatgttgtgagtgtaattcacgccactgaactgcacactttaaaaatggttaaagtggccaggcatagtggctaacacctgtaatcccagcactttgggagtccaaggtaggtggatcacttgaggccaggagtttgaaaccagcctggacaacatggtgaaaccccatctttactaaaaatgcaaaaattagccaggcctggtggcacacgcctataattccagctactcgggaagctgaggctggagaatcacttgaacctgagaggcagaggttgtagtgagccaagatcatgccactgcactccagcctgggtgacagagtgagattctgtctcaaaaaaaacgttaaaatgtgccacattttcttaatccagtctatcatttttggacatttgggttggttccaagtctttgctattgtgaatagtgccacaataaattaggagacatacctaatgctaaatgacgagttaatgggtgcagcacaccaacatggcacgtgtatacatatgtaacaaacctgcacgttgtgcacatgtaccctaaaacttaaagtataataataataaaaaagtttaaaaaagttaaaacgagtgagattctgtctcaaaaaaagttaaaatgtcaaattttatgttatataatctaccacaatgttttaaaattaattatgtaaaatatcaaaaaccaatgaattatacactttatatgggtgaattgtatggtgtgtgaattatatctcaataaagctgttcaaaaaaataacttgcgtgctttacaatgaagaaaactggcaaaagctacctttaccaaggaaagaaggttaacatcaccaagaaggtcaagtggatttcacgaagctcctgatttgatgtgataaagggccctttcatctctgcagtcttctttccaaaaactcatcaccccaatctaatcatgagaaaaatatctgacaaacctagattggttaacattctaaaggatacctgaccagtcttcctcgagactatcaaaaacgggcagtcatgatggctcacacctgtaatcccagcactttgggaggtgagggcaggaggattgcttgagcccaggagttcaagaccagcctgggcaacctagcgagaatcccccgatctcttccaaaaatctagaggaaaaaaaagactgtcaaaaaatcatgaaaaacaaggaaaggctgagaaactgtcagaccaaaggagactaagaagacaagatgactaaatgcgttgtcagatcctggacaggattctagaaacagaaaaaggacatttgtgggaaaaagggtgaaatatgaataaaacctggagtttagttagtaatactgtaccaatgttagttttgacaaatgtatcccggttatgtaaaatgttaacattaaaagaaaccagatgaaggaacagtgtaggaattctctgtactgttcttgcaacttttctgtaaacttagaattatttcccaaagtaagtttatttagcgctgcaatgaacatgggagttcaggtatctctttaatacacggatttcaatgatttaatcatggcacaatgtaaacatatgttacaatgtcacattgtaccccctaagtgtgcacaattgttattgtcaattggaaataaacaaagtttatctaaaacaaacaaaaaaataactgtggtagttttcattaaccttgattgcaacagggtgtaatcatcattgattaccaagtaggagaaacaaacctaaagtatctaatccatgtaaacgaatttgtcagttgtcatctgttgctattaaatgaatatgatgtaatatccaattggcaaatcataaattttgatttatacttaatttgagaagtgtttggattttgtacctggtgctgggggttagaatagtactgtgtcattcaatagctacaggattctgggtgggtttaggtttttaggcaacatatctattcctttggatagactcttggtgagaagtgggttgaaagagattagggaacagatattgagtatttcctgaccatgcccaacattttcccattgattattctgtagaaaccagcattggtgggaagacagaataaatgatccccccatgcaaaccacggaattaaagaatgtttgcacacccagaaggcacacccctggttgttcacgttgactgtgtatatatccaaatgggatttctatactacagtttcccaaatgttggtcttttacatgcaaacttcgtctcatatctgcataaccctgtgtgattgttccgttaatatttttctttaaaataattctattttctttaattcgaaatgaaactgtctcagaattcaccactatataattcatctatgtaacaaaaaccacttgcacccccaaaagctattgaaattttaaaattgctttaaaaagggaactgttagccaggcgcagtggctcacgcctgtaatcccagcactttgggaggctgaggtgagtggatcacgaggtcaggagatcaagaccatcctgtccaacatggtggaaccccatatccactaaaaatacaaaaattagcgggcatggtggcgcgcacctgtagtcccagctacttgggagtctgaggcaggagaatcgggaggcggaggttgcagtgagctgaggaggcagaggttgcagtcagccgagatcgcaccactgcagacatagtctcaaaaaaaaagtggccgggggggtgggggtggggaactgttatccatacaataaaatattatttggtaataaaaaggaataaagagccaggtggggtgactcacacctgtaatcctagcactttgggaggctgaaatgagagaattgcttaaggccaggggttcaagaccagccctggcaacagagggagacccagtctctacaaaaaaaaaaaaaaaaaaagaagaagaaaacattagctgggtgtggtggtgcctgcctatagtcccagctactcaggagacggaagtgggaggatcacttgagtccaggaattagagggtgcagtgagctatgatcatgccactgcattctagcctgggcaacagatcaataccctgtctcaaaataaaataaaataaaataaaataaaataattaaattgaaaataagaaaaagaatgaaggactaatacaggctacaacctgaatgaaccttgaaaacattatgcgaagtgggaaaagcccattgcaaaaagccacatattacacagttccattgctatgaaatgttcagaacaggaaagtccataaagacagaaagaggccaggcatggtggctcacgcctgtaatcccaacactttgggaggctgaggcaggtggatcacaaggtcaggagttcaaggccagcctgatcaatatggcgaaaccccgtctctattaaaaatacaaaaagtagccaggcatggtagtgcgttcctgtagtcccagctactcaggaggctgaggcaggagaatcgcttgaacccaggaggcagaggttgcagtgagccaagatcgtgccactgcactcaagcctgggcgacagagcaagactccatctcaagaaagaaaaggacagaaagcagattagcagttgccaggggttgatgggaaagaaacgaggagtgactatttaatgactacaggtttccttttggggtgataaaaaaaacttttggaattggatagtggtgatggtgtcacaactctttgaatatatcaaaaaccattgaattgtatactttcgtttttgggggggttgggggggataggttctcactcagctgccaaggctggagtgcagtggcacaatctcggctcactgcaacctccacatcctaggctcaagtgatcctcctgcctcagcctcccaaagtgctgggattacaggtaggagacaccaggccctgcactgaattgaatactttcaaagggtgaattttatggtatgtgaattatacatcaataaagctgttgttttaaaaaaggaaaatgtacctattataaaaggaaagttagtatcacttgccacaataggaaataactgtcacgcgtgtccgtatagaagactacctaaacaggctttgtgtggagcaacaaggctgttgattcacttgggtgcaagtgggctgagtccaaaaagagagtcagcaaagggagataggagaggagcagctttatagggcttgggtaggccgtggaaagttacagttaaaggtagttgtctattgtcagcagaggagggggtcacaaggtgcatggtggagagatgatgggactcattgtccagaagaatgtcacagggttgattgatcagttggggcagggcaggaacaagtcataatggtggaatgtcataaggtgggttaattagttaagacaggaactggctgtttcacttctttgtggtttttcggctgctccagattttttggctcctgcaggccatctagacgtatatgtgcaggtcacaggagttacaatggctgagcttcggctcagaggcctgaccataaccataccaataagaatatacaagtaaagccgggcgtggtggctcacgcctgtaatcccagcattttgggaggccgaggagggtggatcacaaggtcaagagatcaaaaccatcctggccaacaaggtgaaaccccatatctactaaaaatataaaaattagccaggcgtggtggcgtgcacctgtagtcccagctactcgggaggttaaggcagaagaattacttgaatctgggaggcagaggttgcagtgagctgagattgtgccactgcactccagcctggagacagagcgagactccatctcaaaaaaaaaaagataaaaaaaaaaggatatacgagtaaaatcttaagtgttcatttatgatccactaaaagtcatctcgatgtaccaccagtagtgtgagtctcacatactatgtacaaacatttctccaggagtagtatggcttgttaaaagtgtatgagcaattaatcccagcactttgggaggccgaggcaggcggatcacgaggtcaggagatcgagaccatcctggctaacacggtgaaaccccgtctctactaaaaatacaaaaagaaattagtcgggcatggtggcgggcacctgtagtcccagctacttgggtggctgaggcaggagaatggcgtgaacccaggaggcggagtttacagtgagccgagatcacgccactgcactccagcctgggtgacagagcgagactccatctcaaaaaaaaaaaaaaaaagtgtatgagcattttaatttcaatagatttgttcactcattcattgcattaaaataatttatcgaatctctgtcaaataccaaatgctgtactaggtgctagaaatagcatcaccgacaaagacaaagtcattgatctcatggaactgacattgtgtacggaaatgctgtgataagcaaacacatagcactgcaatatatatttttgctagtgctaagtgtcatggagaaaaataaaacatcgtaagtgggttacagaatcatgggagcaagatgcttttttattgtggcaaaatacacataatatcaaatgtatcgctttaaccattgttttttgttttttgttttttgttttgagacagagttttgctcttgttgcccaggctggagtgcagtggtatgatctcggctcactgcaacctccacctcccgggttcaagcgattctcctgcctcagcctcccaagtagctgggattacaggcgcccaccaccatgcccggctaatttttgtgtttttagtagagacggggtttcaccatgttggccaggctggtctcaaactcctgaccccaggtgatcttcccacctcagcctcccaaagtgctgggattataggcatgagccaccatgcccggccgcgctttaaccattttaaaatattcaagcactggcatttagtgcattcacagtgctgtgcaaccaacacctctgtctcgtcccagaatatttttattacctaaaaggaaactctacacccagacagaaggtcatggaggtgacatttgaacgggaatctgaaggaagagcaagtgagcgccatgtcaagatctgatcttctttgcataccaccttcaccccatatcaacaaactcctgtactattatttcgttcatattttcctttaaagcgagtctgtctctttacttaagagtacagttacctgctgggtacagtggctcatgcctgtaatcccagcactttgggaggccgaggtgggtggattgcttgaggtcaggagttcaagaccagcctgaccaacatggtgaaaccccgtctctactaaaaatacaaaaattggcctggcatggtggtgggggcctgtagtcccacctacttgggaggccaaggcaggagaatcgcttgaacccgggaggtggaagttgcagtgagccgaggttgtgccactgcactccagcctgggcaacagagcgagactccatctcaaaataaataaataaacaaataaataaatgtacagttatccatagaatataatattatttggcaatttaaaaaaataaagtaccatctgttattgaaaagagtcaaactctataaaatgtttgaagaaattttttctgagccaaatatgagcgaccatggtccatgacacagccctcaggagatcctgagaacatgtgtccaagatggtcagggtgcagcttggttttatacattttagggagacgtgagatgtagggagccgaagacccgtgggacgtgaccaactcagcattccaccggaggctacgtgatcaaacagcaaactgtgtaccatgaatgcaggatgtgagcaaactcacgactgctcctgccgacagaaggtttgccggaggcaatctctggcgtggaggttatctactgcaacatctagagcctgctgttcgaggaatgcagtcttgcaagcctactctggactgagcccctggactccttcttccaccccgcttctcactatcttttttgcctaataaatacggagggctgtgtaaagctcagggcccttgtccactagaggcaaggtgcccccgaccccttcttccaaatatactcttttgtctcttgtcttttattcttgcgttcgccccctttgttcagtccaccaggggtcgtggtaggttacatagtggtgccccgaacagcgacagaatcaggctctcaacaatgagagcttacctcaatcaatacatgtaaaatgtacactggctcaggccggaaaggcgggacaactggaagcagggacctccaggtcgtaggcggattcaaagattttctgattggcaattggttgaaaagaattattatctaaagacctggaatcaacagaaaggaatgtctgggttaagataagggattgtggagaccaaagttttatcatgcagatgaagcttccaggtagcaggcttcagagagaatagattataaatattatcagacttaaaaaggtaccacactcttagttaattctctcctagatcagggaaaagatccagaaaggaaagaagattccctatgttaggaataacatgttagggaaccctggaggcaggcagatcacctgaggtcaggagttcaagaccagcctggccaacacgacgaaaccctttctctactaaaaaatacaaaataaaaatacaaaaatattagccgggcatggtggtgtgtgcctgtaatcccagctattcgggaggctgagtcaagagaatcacttgaacctgggaggtggaggttgcagtgagacaagatcgcgccactgccctccaccctgggtgacagagcagaactctgtctcaaaaagaaacaagaaaaaaaacaaaaaaattagaatgcagtaccgattcatgctacaatgtggataaacattgaaaacaggcctgcctcagtggctcatgcctgtaatcccagcactttgggaggctgaggcaggaggatcacttgagctcaggagttcaagaccagcctgggcaacatgatgaaaccacatcgctacaaaacatgcaaaaattagcctggcatgatggtgtgcatcttagtcccagctactaaggaggctgaggtgggaggattacttgatgcctggaagtggaggttgcagtgagccatgatcacaccactgcactccagcctgggcaacagagaaagaccctgtcttaaaaaagaaaaagaaaagaaagagaaaagaaagcatgatgctgagtgaaagaagccagacaaagagggcttcatagtgcataattccatttgcatgagtgtccagaatagataaatccacagacgtagaaagtaggttagaggtagccatgggctagggagtgggaatggggagtgactgctcatggggatagagtatccttttgagggggtgaaagtgttctagaactagatagaggtggggttgtacaaccttgtgaacgtactaaatgccactgaattgtacactttaaaaaggtttaaatgatgacttttatattatgtgaatcttactgtgataaaaatatcctgatttctgtgtcccaaaccattgaaagctaaatcttggggagctgggccctgccaccaggcctccacaatatcaaccctagctgccccagtgattccagtaggcagcaagagttgaagtactggggtctagagaccagttcaagcatgcagatgtgtcagggttaatgatattttgtacaagtcctgggccagataacagctgttacaactaaaaggtcaatacacctaagatacaaagatcttctgcaaataagacacaaataacctaaatgtgtccaaatatgcagataatctttgaaatgggcagccacaggtgagaagctctttaaaaaattaaaataaacgggccagacccggtggctcacgactgtaatcccagcactttgggaggctgaggcgggtggatcacttgaggtcagatgttcgagaccagcctggccaacatggcgaaaccctgtctctactaaaaatacaaaaattagctgggcctagtggcacgtgcctgtaatcccagctactcaggaggttgaggcaggaaaatcgcttgaacctgggaggcggaggttgcagtgagccaaaatcgcaccactgcactccagcctgggtgacagagtgagactccatctgaaaataaaataaaataaaataaaaataaaataaaataatgaaaagaggtctttcctgctagtgaagttaaaaaagaaaaaagaaaaagaaaaagaggtcaacttcactatcagccagggaaatgaataccctagaacttaaagtataataaaaatatatatatttttaaaaaaaaagaaaatgagagtaaagatgacttactagttttcactcatcagactggcaatcattcaaaaactaataatgcaatgaaacccagtgcttgcaactatgtgttgaaaagggcacacctgtgtgttgttcgtgggaatgtgatttattattgcatttgggggaagttactagaacaacacctagttgaaattccacactgggaatccaccctatagaacgatatttatcaagggattatttgtagtagcaacaaaaaacaaactataaataacctgtgtgccctcaatggtggaagggttggataatcagagtacactcctatcatgagccattaggtagctattaaaaataatgagttagatatctatctattcgcctggaggaattccatgatgtacgtgctgccaagttttttaaaaaatggataaataagtaggtttcagagaaacatatacagtcatgtgtcacttaatgacagggattctttctgagaaatgcttcattaggcaatttcatcatagtgccagtaacctagagtgagcttacataaacctaaatggcatagcctactacacaccagggctatacgttctagtctattgctcctagactataaacctgtacagcatgctactgtgctgaatactgtaggtaactgtaacacaacagtaagcatttgtgtatctaaacatagaaaaggtacagtaggcctggtgcagtggttcacacctgtaatcccaacactttgggaggccgaggcgggtggatcatgaggtcaagagttcaagaccagcctgaccaatatggtgaaaccccatctctagtaaaaatacaaaaattagctgggcgtggtggcacacatctatagtcccaactacttgggcggctgaggcaggagaatcgcttgaacccgggaggcggaggttgcagtgagccaagatcgcgccactgcactccagcctgggcgacagagtgagattccgtctcaaaaaaaaaaaaaatacagtaaacataagatataaaacaaaaaatgatatatctatatagaatgcttaccaggcttgcagcactggaagctgccctgagtgagctagcgagagagtgatgagtgaatgtgttgctactgtacacttagcatacactaaatgcattttttaattctctttataatcagcacataataattgtacatgtttatgggtacctgtgatgtcttaatacatatgtacattgcataatgatcaaatcaggatagtgagcatgtccatcacccaaatctttatcatttctttgtggtagttacattcaagatcctccgttttctagctatcttgaaataggcaatacaggccgggcacaggggctcacgcctgtaatcccagcactttgggaagccaaggcgggcggatcgcctgaggtcagcagttggagaccagtctgactaacatggtgaaacccccatctctactaaaaatacaaaaattagctggtcatggtggtgggcacctgtaatctcagctactaaggaggctgaagcaggagaatcatttaaacccaggaggcagaggttgtggtgagctgagatagcaccattgcactccagcctgggtgacagagtgagactccatctcaaaaataaataaataaataaataaataaataaataaatacagatgaagatttgtttgcctgccccattgctcacctcctgctgtgtggcccagtccctaacacgccacagaccactaccagtccatggccttgggattgggacccctgccctagttcatgttattttattacagaagacctaagaaaataatatagtatccaattagagagacttgaaatggaaaggatgttcctaaaagaagcctaattgaaattaggatgggaagagagaggaggaaacacccaccctttgcaaaccatataaatgataaagggttaataaccaaaatataaaataaactcctacaactccacagccaagaaacaactcgattgcaaaatcgattaaaaacttgaatagaaatttatccaatgacatgcaaaaagccaagagatatatgaaaaaatgcacatcactaatcatcagggaaatgaaaatcaaaccacaatgaggccgggcgcagtggctcatgcctgtaatcccagcactttgcgaggctgaggtgggtggatcacttgaggtcaggagatcaagaccagcctggccaacatggtgaaaccccatccctactaaaaatacaaaaattaaaaattagcacacacctgtaatcccagctactcaagaggctgagacaggaggcttgcttgaacctgggaagcagaggttgcagtgagcggagatcgcacctctgcactccagcctgggagacagagcataaataaataaataaataaataaataaacaaacaaacctcactcttttcctcacctaacagcaggtccccgagcagatactgaagatgcctcaacccatagccccttggctcacctctgatttcaccttacagcagcagtgggcaatttcacatatgctggtggaagccccgctacttctgtctttactgtctggacatcttctccagcaccgtgggagtgtgctcagcaggggatttaacatccccaagtaccaccctcaacaaataaaggagtcaatggtaaatacccacatacctcttccctcaatggaataattctgaaggtgcggtctatgtgataccccagagagttcccccagcaggatggagccctgtttcctacaaacggaatataatgtgtttattaacatactttatttcctgcttcattttccccacttctgggaccaaataaaccatctgcacccaagtgctttatgattagagcctgttttgaacccaaatcaagactatcagttcccctgggcacagtggctcatgcctgtaatcccagcaatgtgggaagctgagaaaggaggtctagaccagcctggacaacatagcaagacctcatttctaccaaaaaaaattgtaattagcctgtcatggtggcacacacctgtagtcctagctacttgggaggctgaggtgggaggatcacctgagctcaggagttcaaggctgtagtgagctatgatggcactcacagcctgggtgacagagcaggaccgtctcaaaaataaataaaccaaacaccacatgttctcacttataagtgggggctgaacaatgagagcacatggacacagggaggggaagaacactcactggggcctgttgggggagggcagggtggggagagcattaaggaaaagagctaatgtatgctgggctcaatacctaggtgatgggtagatgggtacagcaaaccaccatggtacacatttacctgtgtaacaaatctgcacatcctgcacatgtaccctggaacataaaaacataataatattttgaaaaaactctatcaaaaaataaataaataggattctgctatttattctgctctaaagacccatgcacatgtatgtttattgcagcactattcacaatagcaaagacttagaaccaacccaaatgcccatcagtgatagactggataaagaaaatgtggcacatacacaccatggaatactctccagccataaaaaacaatgagttcatgtcctttgcaggaaaatggatgaagctggaaaccatcattctcagcaaactaacacaggaacagaaaaccaaacaccacatgttctcactcataagtgggagttgaacaatgagaacacatggacacagggaagggaacatcacacaccacggcctgtcaggtggtgtggggcaagggaaggaagagcattaggacaaatatctaatgcacgcagggcttaaaacctagatgatgggttgataggtgcagcaaaccaccatggcacatgtatacttacgtaacaaacctgcacgttcagcacatgtatcccagaacttaaattaaaataataaataactaagtacatataaaaatttaaaagactgtccgttctacttgaccactgccacatcaggagcccttgacccttgccagaattcaggaatccccatctctcctagattctaatcaaggaagaaaatcagggactatataaaaaccttttaggtgttggattttaaaaaaagcatttgtgcttggaagaatgggtggagagtggctgaagcccaagatgctgagagaagaaatctggacctcactcctagagaggatagaatgaagtagaccacccccttcttcctccctcccaatgttcattgatggtttcctggtaccagactcattgccacataaagactctaagattttcccaaagcaatcagcactggactccaaaccaacatgactagaaaactggactctgggagtgtataactggccctgccttataccaatttcccagggggggaaatgttatttttgataacattttctatagagtcatatcaaaaagaaaggcttttttcttcctgaatatatcttttattcctccttatctctcttcactcttccttctataactggtttcagaattcccaggagagttcggatgggagacaccaatgtcctacctaccatggctttgggcaaaataattttttttcagaaccacggacagtggcaaaagtttgttcacccagtgggacttttttttttttttttttttgagatggagtcttgctctgtcacccaggctggagtgcagtggcacaatctcggctcactgcaatcttcgcctcccaggttcaagtgattctcctgcctcagcctcccaagtagctaggattacagatgcccacccaccatgcccagctaatttttgtacttttagtagagactgggtttcaccatttttcccaggctggtctcgaactcccgacctcaagtgatccacccgcctcagcctcccaaagtgctgggattacaggtgtgagccaccatgtctggccaccttatggactttttaggtgggtttttccccaacctttgggctcaaattgattttttttttttttttgagacaaggtctcactctgtcacccaggctggagtgcagtggcatgatctcaacttgctgcaaacttcacctcccgggctcaagggatcctcccacctcagcctcctgagtagttgggactataggcacgtccagctaattttgtatttttagtagagacagggtttcaccatgttggccgggctggtctcaaactcctgagctaaattgatccacctgcctcggcctcccaaagtgctaggattacaggtgtgaaccaccatgcccagcctctgaaaataattttaattttaaaaaaataatgacagtgggattggcacctactcatatccccatatgtccaacgcgaagttggtctaccttgttcttgctttgaagctgacctccccacagagttacgatccaagagccaacagtccaacagccaatattattagggaaagtaattctaatatttactaaagcccctaggagaatttcaacaagtatcctacacacgttctgtgtggctgataggaaggattttttttttaagagacagggtctcactccgttgtccaggttggaatgcagtggtgcgatcacagctcactgcagcctcaacctccagggctcaagtgatcctcccacctcagcctcctgggtaactgagaccacgggcatgtgccaccaatcctggctaatttttttaaattttttgtagatataaggtcttgctgttttgcccaagctggtctcaaacttctaggctcaagggattctccaaccttggcctcccaagtagctaggattataggcatgagccaccgtgtccaactccagtgccaagcaggtgatcaagaagtgtttgataggccgggtacagtggctcaggcctgtaatcccagcactttgggagaccgaggagagcagatcacttgaggtttgagatcagtctttccaacatggtgaaaccctgtctctactaaaaatacaaagactagctgggcatggtggtgggcaccagtaattccagctactcaagaggctgaggagggagaattgctagaacccaggaggtggaggttgcagtgagccgagattgctccactgtgctccaggctgggtgaaagagtgacactccatctcaaaaaaaagtgtttgataaatttatttatttaataccgatttattgattgattgatactcttcggagctttccttaatgagccagtttcttccataatgcaatgaatgaaaggacctctcagattcaggcatctgagtgcccgactggagtctgggaccccccagacctctctgcctgggagcttccatgaagctcagcctgagctggaaggagaccgtagggagatgtcctagtgagagtgaatccctagtcactgtttcctcttcttacccactcgatgatcccaaagcacacccatctccaaaagaacaggtcacatgtggcagaggagaaacaaaataattagcatccgcttccttaacaaggagctatggggacgaagtctcctagagtccccagactataaataccctgatgttcccctggctcccccactcacctgcagagtctgggggcgggggggtacacatatgaatccttcccatagacatcaggctaaccccagcgatcacaggtgagtagcccccatgcccttcctaggggtttagtgctgacctcgggatcctctagcagttggtggagaaggaggcttcccgggaccctccccttggtgatgccatcctggtgagcaggtgagggatggggaaaggattgagctgagggtgggggtggagggttgtgggagaggaatctgtctccttcctagaggccgagagagagagaagagactgagaccaagtctagactctctgagtggacaaagcacgcagacggcagaccctctgtggcaggatatgtggaggaaaagcactgagggtctgcagctgcaggacacctgcacagataggagaggtcttgagaaacaagtttctccaatgcagcagctccccaagtgtggtccctgggctagaagcaccagcatcctctggaaactatctagaagtgctggttcttacaccagacatttcagggaaagggcttagctttttgtgtatgatgagtttgggagcgggggggagggggcggggggattgttttgtttgtttgtttgttctttctgtttttgagacagggtctcgctctgttgcccagtctggagtgcagtggcattatcatagctcatcgcagcctcgacctcccaagctcaagtgatcctccctcctcagcctcccgggtacctgggataacagacatataccaccatgcctggctaattttattttcgtagaggcagggatcttcctatgttgcccaggatggtctcacactcccgggctcaagagatcctcctaccttggccccccaagcagctgggactaacaggtgtgtgccaccatgtccagctaattttttattttgtagagatgggggtctcactgtgttgcccaggttggtctctaactcctggactcaagggattctcccacctcagccttctgagtagctgggactatggaagcatgccaccatgcccagcagattgttttattttttgtagatccagggcgggattgggggtggggtggcctcactttgtctgccaggctggtcttgaactcctggcctcaagcaattctcccacttcagcctcccaaagtgctgggattacaggtgtgagccaccatgcctggcccgctttttgtgttttaacaagccttccaggtgaccctgaagcgtgctcaaggttgagaaccgctgctctatgcaacccaagtcaacaactgaggactgttacaaatatgttgccaggaagggaatcgcagtattctatccagcctagagaaaaccaagcattgcattgcaaaaacctcaagtccaacactaaaaagcctcaaaaagttaacatagggctttgctgaaggcctcttggggttaccaaggagattatgctgctaaccttcctaaaaacccctttcatcggctgggcgctgaaatgatgagattactgggctcacgcctgtaatctcagtactttgggaggccaaggtgggcggatcaccgggtcaggagttcaagaccagcctggccaacaggcttagtagaggcgaaaccccgtctctactaaaaatacaaaaattaatcgggcgtggtgatgcacacctgtaatcccagctattcgggtggctgaggcacaagaatcacttgaacccaggagacggatgttgcagtgagccgagatcgtgccactgtactctagcctaggtgacagagtgagactctgtctcgaaaagaaacacgtgtaaatgcttgtaattgaatatttttcccttgcacgtgttgacagcacagaatttagcttcgaaatgcctcataaagaggtgagagtggccattcttagggaggcagtggagtatgagagtgaaaataagtctaaattcaaaggcgagatcaggcacttgcaagctgagtgcccctggcagctcgctcagccccagtctgctcactgtaaattgtagctaacacaatctccctgtgggagttattgtaagacctatgcattaagaaactggctcctggctggctgcagtggctcacgcctgtaatcccagcactttgagagatcaagccgggcagatgatgaggtcaggagttcaagaccagtctgacaaacatggtgaaaccccatctctactaaaaatacaaaaattagccatgcgtggtggtgctcgcctgtcatcccagctactcaggaggctgaggcaggagaatcttttgaacccaggaggcgggggttgcagtgagccaagatcgcgccactgcactccagcttgggtgacagagtaagactccatctcaaaaaagaaaagaaagaaagaaaccggctcctcatcaggataaatagctaatgcatgctgggcttaataccgaggtgatggcttgataggtgcagcaaaccactatggcacacgtttacctatgtaacaaacctgcacgtcctgcacgtgtatcctggaacttaaaataaaatgataaaattaaataaaataaaaatcatgctgagcagccaatagctgggggaaaaaaaaagaaagaaactggctcctaagaaggtttaacccattacagatatcattattgctgagggcaaaataaaaacacctgtcccagctactaggaaggctgaggtgggaggaacacctgagctcaggaggtacaggctgcagtgagctgtgattgtgccaccgcactgcagcctgggtgacagagtgagaccctgtctcaaaataaattaaattaaattaaatagatcttgtattagataattttgcctaactgtaggctaacgtaagtgttctgagcacattgaaggtgggctaggctaagctgtgatgtttggtaggttaggtatgttcaatgcatttttgacttatatatatatatatatatatatatatatatatatatatatatatatttttttttttgagacagagtttcgctcttgttgccaaggctggagtacagtggctcaatctcagcccactgcaacttctgcctcccaggttcaagcgattctcctgcctcagcctcccaagtagctgggattacaggcatgcaccacaacgcctagctaattttgtattttcagtagagacggggcttcaccttgttggccaggctgacctctcaaactcctgacctcaggtgatccccctgcctcggcctcccaaagtgctgggattataagaatgagccaccacgccaggtctgacttatgacattttcaatgtatgaccccattatcagcctcagaacatctgtacctatcatttcttggtggtgagaacataaaattgactctgagtttctctggtatacaatgcattgttattaactatagtcactatgctgtacaatagatctcttgaattatgcctcccatctaattgaaattttgtattctttgatcaatatctccctaacacccacctcccgcccccagcccctggtaaccaccattctactctgcttctatgagattggccattttaaattccacatataagtgagaccatgtggtatctgtctttctgtacctggctattttatgtaacagaatgtccttcagtttcatctatatggttgcaaatgatagaatttcctcttttttccatggctgaataaatagtattccattgtatattcctaccacattttctttatccattcatcggtttttaacacaaaactgatgttaaagattacatattgttggtggaaggatgaaggggaaggagggttgaggggggaggaaagaaaagagggagatggccaggcgcggtgcctcatgcctgtaatcccagcaccttgggagtccaaggcgggtagatcacttgaggtcaggagttgagaccagcctggccaacatggtgaaagcccgtctatactaaaaatacaaaaattagccagtcatggtggtgcgtgcctgtaatccccgctacttgggaggctgaggcacgagaatcacttgaacccaggaggcagaggttgtagtgagctgagatcgtgccactgaactccagcctgggtgacagagcaagactctgtctcaaaaaaagaaaaaggaaaaagaaaacagggagagaacacaggaaaggaagagaaggaaaaacagaagatggtcaggttccctttactgtatagagtttttgttgaggtttgattctgcttgattttctttttttatttttgttttttgttttttgtttgagacagaatcttgctctatagcccaggctagagagccgtggcacaatctctgctcgctgcaaactttgcctcccgggttcaagctattcacctgcctcagcctctagagtagctgggattgcaggcgcccaccaccacgcctgattaatttttttgtatttttagtagagacggggattcaccatgttggccaggctggtctcgaactcctgacctcaagcaatctgcccgcctcagccttccaaagtgctgggattacaggcgcgggccacttggttttgttttctatgaagctttgctccactgaaggaagcaaaagtgtttatagagaacatccaagttgactatgagcgactccgttagatccttgagaccctgactgtctcaggcatgaatgacttggcttgaggagcaacagaagcccactgaagatggcttgaggttaactgaacacaaaggaatttgatggatttgatggaattttcacagaacagtataggtttccgtgggaagctgggaccagaatggcatctctgacacctggctctgtgtggtttttctccctttttgttcccactagtcacagaccatacatggaaccagaaaagcaaaccgaaatctcagaattcttcctccagggactctcagaaaagccagagcatcagaccctcctcttcacaatgttcctctccacatacctggtcaccatcattggaaatgccctcattatcctggccatcatcacggactctcacctccacacacccatgtacttctttctcttcaacctctcactcgttgacaccctattatcctccaccaccgtccccaagatgctagcgaacatccaggctcagagcagagccatcccctttgtgggctgcctcacccagatgtatgccttccacctgttcgggaccatggacagctttctcctggcagtaatggccatcgaccgcttcgtggccattgtccacccacagcgttacttggttctcatgtgctcccctgtctgtgggctgctgctgggagcatcatggatgatcaccaacctccagtctctcatacacacctgcctcatggctcaactgaccttctgcgccggctctgaaatctcccacttcttctgtgacctcatgcccctgctgaagctctccggctcagacacgcacaccaacgagctggtgatctttgcttttggcattgtcgtgggcaccagcccattctcctgcatccttctctcgtacatccgcattttctggacagtctttaagatcccttctactcggggcaagtggaaagccttctccacctgtggcttacacctcactgtggtgtcactgtcctatgggaccatctttgctgtgtacttacagcccacatcccccagctcctcccagaaggacaaggcagccgccctaatgtgtggggtgttcatccccatgctcaacccctttatctacagcatacggaacaaggatatgaaggcagccctggggaagctcatcggcaaagtggccgtcccctgtcctaggccagaacagttattggatgtttatcatgttccaggatcactgttggctgctagggacacagagatgcatcccatcccctaccctggaggagttcagagtctagctgggaacagagacatggaataaatccttccagtacaacgtgataaatgtgtcataaagagatgaacaaagtgtatgagcacccaaaggaaaggtgtgcattttccccaggatttatcttccccaaaaagatcagaatagcaaggatcaaactggcctgaaattagccctcctggaggatcagccttttaggattgctatgtgaataagagtagttgaaaacaagagacgtagctacactcattttagtattgacaaaggccaggtgtggaagctcaagcctgtgatcccagcattttgggaggccaaggtggaaggatcacttgaggccaggagtttgagaccagcctgggcaacatacagagaccctatctccacacacacacacaaaatcactttagcaagacatggtggtatacgcctgtagtctcagctaatcaggaggctgaggcaggcagatcatttgagcccaggagttcaaggttgcagtgagctatgactgcaccactgcacttcagcagtttgggaaactgagcaagatctgtcactcataggtagatagatagatagatagatagatagatagatagatagatagatagacagacagatagatagagaggataagataagataggtagatagggtggatagataagatatgtagatagatagatagatagatagatagatagatagatagatagatagatatacagatagatacatagatagataggatagataggtaggtaggtaggtaggtcaaccgatcgatagatctatctattgacagacagatagatgattgattgatagatagatcatataagtagatagatgatagatagatagatagatagatagatagatgagataggtaggtaggtcagtcgatcgattgatcaatcgatcaacagatagatgatagatagatggatggatagatagagatagaggaggtaggtagatagatagatagatagataggtagatacagacagcccatgtattagccagtgtttcctaagtgttgtggaagaactttgaaaatatttgcaagtgagattagctcacgtgctgttcgcttagtcagccagcaagcctcagcctcctggggggtcttgagacctccacttgtaactatgactgtggttggggcttactttctcaattcccaacaggcttcctgtctccccacaacccccagtcaaggggactctgatgcagacggtccatcaatcgtagtttgggaacacagaccctagcctagctccaaaatctatgtgtttcctgtgacattcatcgcctgactctgaacccagtatgattctacacgcagggtcagccacagcagatcaggtggcccggggcacttaaaaagttagtgttatgggttgaactgtggctcccaaaaaaagatacgtgggaggccaggcgcagtggctcacacctgtaaactctggcactttgggaggttgagtagggagaatcatttgaagctaggagttcaggaccagcctgaacaacatagtgagatctcatccctacaaaaaataaaaatgaaaaaagaaaaaattacctgggtgtggtggtgtgcacctgtcatcttagttactcgggaggctgagacaggaggacctcttgagccaaggaggtcgaggctgcatgagctatgttcctgccactgcactccagcctgggaaacagagcaaggccctgtctgcaaaagtaataataataaaataaaaaagatatgttgaagtcctaaccccaaggacctcagaatgtgaccatatttgaagatagggtgtttacagaggtcattagattacagtaaggtcattaggttggtccctaatctgatacgactggcgtccttatgaaaaggggagatttggacacaggcacccacacacatggagaccgccacatgaagatggaggcagagattggggtgatgctcctacaagccaaggaatgccagggactgcctgcagaccaccagaagccaggagaggcgtggaacaggctatccctctcagccctcagaaggaaccaaggaatcaaagctgctgacaactgatcttttttttttttttttttttttgagacggagtcttgctctgtcatcccggctggatgcagtggcatgattttggctcactgcaacctccacctcccaggttcaagcaattctcctgcctcagcctcccaagtagctgggattacaggcacccaccaccacgcccagctaattttgtgtttttagtagagatgggatttcactatgttggccagactggtctcaaactcctggcctccagtgatctgcccacctcagcctcccaaagtgctgggattacaagcgtgggccactgcacctggcccaacaccttgatctcggactcttaacctccagaactgtaagacaacaaatttctattgtttaagtcacctagttcatggtaatttttaaatttttttttcttttagagacagacaggatctactgtgtcacccaggctggagtacagtggtgcaatcatagctaaagtgcaacctcacctcaaactcctgggctcaagcaatcctcctgcctcagcctcctgagtagttgggactacaggcctatgccactgcaatcagctatatatatttgtagagacagggtctcactatgttgcccaggctggtctcaaactcccggcctcaagagatctgccctcctcggcttcacaaagtgctgggattgcaggtgtaaaccaccacactcggcctgatttgtggtactttgttgcaacattgctagaaaacaaatgcagttagtttaagaaatgtcagcaacctacaaaacctacaaagtgtcccagtacatcctctcaagtttacaattgaccatgtgttctggccaagggaccctgggctagaactggagaaaaggatgaaggatttagattgcatggattcacttactgggtatcagcatgatgacaataatgatgatgacaaccgagatttattatctgaacaatgctaactcctttatatgcacaatctcaataagtgttaagcaacacccctacaaggtaggtgcagaagtaattgtggttttgccactgaaagtaacagcaggctgcgcatggtggctcacacctgtattcccagcactttgggaggccgaggcgggcagatcacaaggtcagtagatcgagaccatcctgaccaacatggtgaaaccccctctctactaaaaatacgaaaattaggccgggcacagtggctcatgcctgtaatcccagaactttgggaggctgaggtgggcggatcatgaggtcaggagatcaagaccatcctggctaacatggtgaaaccccatctctactaaaaatacaaaaaattagccggacatgttggcgggcacctgtagtcccagctactcgggaggctgaggcaggagaatggcctgaacccgggaggcggagcttgcagtgagccaaggccacgccactgcaccccagcctgggtgacagagcgagactcctcctcaatttaaaaaaaaatacaaaacttagccaggcgtggtggcccacacctgtagtcccagctacttgggaggctgaggcaggagaatggcgtcaacccgggaggcggagtttgcgtgagccgagatcgccccactgcactccagcctgggtgacagagcgagactctgtctcaaaaaaaaaaaaaaaaaaaaaaaaaagtttgtaatttaaaagtttgagcatcactgggctagatgggggtcctgtagataaccgggacccaaataggctttaggtacagagatacaggagaaccagatttggggtgccgctctagccactgtgtccaggagggaaccttcccaaccgccctaaaagctctgaaaactacagttagagaagtggccactaggtggcaataatgtcatttcacaaattggatttaaaacgctttttttttttttttttttttttggtttttggttgttttttttttttccccggaaacttgtattctagctgtgaactggcccaggtccatggcccttaggtgtaatctccccctggaagggcacaacaggtgcaaagtttccatgatgagaaggagcctgtgttgtttaaagaaatcacggagactggtgtggcctgagcccagagtgacagggaagctgggtttgcagggggcccgtggagggcactgggagtaacacggtgtgtggaccacggggagtgggaccatgacaaggtttaaggaggatagggggtggggctgtgcttcagaacgaacctgccagttatccatgccatagatctggagtcagcaaactttttctgtcaaggtccaggtcgtcaatattgtcagctttagggaccttaccatctccgttgcaatgactgaactctgctgctgtctggcgaaagcagccatagatgagacatcaacgaatgggcttggctgtgttccactaaaactttgtttataaacacagaagcttccatttcatatcatagtacatgtcataccttgtagcctttgggtttgttttcaaccacttttaaaatgttaaaactactctaggccaggtgcattcactcatgcctgtaatcccagcactttgagaggccaagggaggaggattgcttgaagccaggagttcgagactggagtgggcaacatagtgagacctcccccatctctacaaaaattttttaattagctgggcatggtggtgcatgcctgtagtctcagctactcaggaggctgaggaaggaggatcacttaagcccaggaggtcaaggctgcagtgagctatgattgcaccaccgcactccagcctgggggatagagtaagaccactgtctctaaaaaacttaaaaaataaataaataaataaaaataaatgcaaaactatttttatttcaagggctggatttagcctatgggccataggttgccaatcctcgtatagatggatgggagtgacaagagttaaggggaccaagaaagaccaaaaagtgagaggtgaagtgggctgaaaaccatcagaagataaggagctggtgccacaggacctttgcaaatgctgttccctcttcctgacccctcctgagtaaattcctgcttggcattgagatttcagcacaaactccacttcctcaaggaagcctcccctaacctccatcccttgcccagctacatcagttgccctaatgttacactcgctatcccctctctcatcatcactcatcattagtgatctcttcatcactgcagtggttttgtggggtcttttgttttgttttgagacagagtcttgctctgtctcccagtctggagtgcagtggggcgatcccggctcactgtaacccccacctcctgggttcaaatggttctcctgcctcagcctcccgagtagttgggattacaggcacgcatcaccatgcctggctaatgttttgtatttttagtagaaacggggttcaccgtgtttgccaggctggtctcgaactcctggcctcaagtgatccacctgcctcagccccccaaagttctgggattacaggtgttagctgctgcacccggcctcctcactgcagtggttttatattagtttgtgtaaccctttgattaatgtctgtttcacccatttgactgagctgggagctgggacctgaaatagtgttatcttgtttatctttgcacctctgtgcccctatgattagtacggtagccactcaatgtatgttttctggccacgcaccgtgcctcacacctgtaatcccagcactttgggaggtgaaggcgggcaatcacctgaggtcaggagttcaagaccagcctggccaaccacggccaacgtgatgaagccccatccctactaaaaatacaaaaattagccaggcgtggttgcacgtgcctgtaatcccagctactcaggaggctgaggcaggagaatcgcttgaacccgggaggcaaaggttgcagtgacccaaaatcatgacactgcactccagcctgggcgacagagcaagactcttgtctcagaagaaaaaaaaaaacaaaaaacactttttttctttattttaatttaatcttattttattttatttattttattttttgagatggactctcactttgtcgcccaggctaaagtgtagtggtgtgatcttggctcactgcaacctccgcttcccgtgttcaagttattctcctgcctcagtctcccaagtagctgggactacaggtgcccgccaccatgcccagctaatttttctatttttagtagaggcggggtttgaccatgttggccaggctggtcccgaactcctgacctcaaataatccacccacctcagcctcccaaagtgctgggattataggcatgagccaccgcacccagccacaaaatatattttctgaatgaatgaatgaatgaggcagtgtgatggaaaggttttaggaataccggatggggcagccaaagtaggctgctgagttggaacaaagatacctgcagtcaaggttaagtgagagatgcactcctcctttgatatccccaaccttcagttatgcctgtcccacactcaggtgccttgtgggactgggactctgctgaaattaagaagccaggggcctcatcccacagagcaaaaccagcaagatggcgggactccttaattcagcaacaacaaaagacagaaaataatctggaaattctctaaaatcttagcaagcatgctggaagaggtttgagccaatcttatccagtaaattttttttttttttttttttgagacagggtctcgctctgtcgcccaggctggagtgcagtggtgtgatcatggctgaatgcagcctcgacctcctgggctcaagcaatcctcccacctcagcctcctgagtagctagggctataggcacgcaccaccacacatggctaattttttttacttttttatagagacgaggactcactatgtggcctattccggtcttgaactcctggcctcaagccatcctcccaccttggctcccaaaccgctgggattacaggtgtaagccactgcacacggcccaagcctatattaagagtacaagaacagaccgggcacagtggctcacgcctgtaatcccagcactttgggaggccaagatgggtatattacctgaggtcaggagttcgagaccagcctggccaacatggtgaagcccccatctctactaaaaatacaaaaactagccaggcgtggtggcatgcacctgtagctccagctactcaaggctaaggcaggagaatcgcttgaacctgggaggcggaggttgcagtgagccaagattgtgccactgcactccagcctgggtgacacagcaagattctgtctcaaaaaaaaaaaaaaaaaaaagtacaagaacacttccttctctccatgtgaaattttattgggtgattcaaagcaaatctggagattcgggaactgaggctcagagacgaaaagtgaccaccccaaggccacatgccagatctggggcagagtgggggaatccagcccaggctggtgtgacctcaaaacccagcctctccctccctcatgatgctggtagcctcccaggtgggtgacttgcccaaggtcacactgcagcttggagcaactcaaggcctgtcccgggaggagggagcagcccctgtgtgggactctggggagtgaaaagcggacaagccagcaggagtggccactttctggaaagtgtaagaaagattcactaagatttgggctgaagttcgcagagatggattgggacaatcctcccaactgtccatttgccaggaacttggcaggaaatggaggtggttttgtttgtgtaaacctttgtggctggggatcccaaaggcatccctcacctttaatgatttgctagaaagactcacagaactcagtaatgttattatactcatggtttattgcagtaaacagatacagattaaaatctgcaaagggccagccacagtggcttatgcctataatcccaacactttaagtgagagatgcactcctcctttgatacccccaaccttcaattatgcctgtcccacactcaggtgccttgtgggactgggactctgctgaggcaggaggatcacttgaagccagaagttcgagatcagcctgggcaacatggccagaccctgtctctacaaaaaattgtaaaaattagccaggcgtggtgatgcacacctgtagtcccagctacttgggaagctgaagtcggaggatcactcagatctaggagttcaaggttgcagtgagctagaattgcacaactgcactccagatgaggcaacagagtaaccccccccccttttttttttttttgagacagcatctagctctgtcacccaggctgggatgcagtggtgtgatcacagctcactgcaatttctgcctcctgggctcaagtgatcctccctccttggcctcccaaagcaacgggattacaggtgtaagccaccacacctggcccccattaaaaaaaaaaaatctgcaaaggtaaaaggcagatagagcagcatctaggagacaccaggcatgagcttccagctgttccctcccagtggagttgtacagacatagacaatgctgaattctcacagccacaatgtgtaacaacaggtgcagagtgttgctaaccaaggagctgacccaagccttggtgttctgggttgtttttgtttgtttgttttttgtttttgtttttgtttttttgaaacggggtctctctctgtcacacaggctggagtgcagtggtgcgatctcggctcactgaaacctctgcctccagggttcaagcaattctctgcctcagcctcccgaggagctgggattataggcgcccaccaccatgccccgctaattttttgtatttttagtagagatggggtttcaccatcttggccaggctggtcttgaactcctgacctcgtgatccacccgcctcggcctcccaaagtgctgggaggtgttctgggttcttattggaggttggccactgtattacaatagttcccgcttcttcatgaggtttcagttacctgctgtcaacagcagtccaaaaatactaaatgaaaaatttgagaaataaacactttgggttgggcatggtggttcacgcctgtaataccagcactttgggaggccgaggcgggcggatcacgaggtcaggagattgagaccatcctggctaacatggtgaaaccccatctctaataaaaatacaaaaaaaatagctgggtgtggtggcgggcgctgtagtcccagctactcaggaggctgagacaggagaatggcgtgaacctgggaggcagagcttgcagtgagccaaaatcacaccactgcactccagcctgggcaacagagtgagactccatctcaaaaaaaaaaagaaagaaaaagagagagaaaaaaaaataaacaattagtaagtttttttgtgggtacatagtaggtgtatatatttatgaattacatgtcatattttgatacagggatgtacacatcagggtaaaatgggtatccatcccctcaagcatttatcttttgttttacaaacaatctgattatgctctgtaagttattttcaaatgtacaattaaattatttttgactacagtcaccctgttgtgctagcaattcatacgtttttggttttgggttttgagacagtctcactccgtcacccaggctggagtgcagtggcacaatcttggctcactgcaacctccacctcctgcattcaagcaattgtcctgcctcagcctcccgagcagctgggactacaggtgcccgccaccacacccagctaatttttttgcatttttagtagagatggggtttcaccatgttggtcaggctggtctcaaactcctgacctcaggtgatttgcccacctcagcctctcaaagtgctgggattacaggcatgagccactgcgcctggccacaactcatacgttttaaagtgcgtgccattctgagtagtgtgatgaaatcttgcaccattccactccatcccagctgggatgtcaatcctccctttgtttggcacatctgcactgtaaacaccccacccatcagtcccttactagccatggcagttatgagatcgacaaaacacagtatagctagggttctgtactacccacggtttcaggaatctaccgggcatcttggaacatgttccctgcagataatggaggatcactagtgtcctgggactaccataacaaaataccacagcctgggaggcttaaacaacagaaatttattttctcatagttctggaggctggaagttcaaggtcaagttacgttggtagggttgttctgtggcttctctccaggccttgtaagtggctggctgttccctgagacttcacattgtcttccttctatgtgtgcacacatctgtatccaaatttcctcttctcgtaaggcactagtcctactggattaggactcaccctaaagacgtcattttaacgtaattacctctgtctctagctccggggtatttctccgccaactcaccatgactgccacagaagtgctgagctctgcccaaacctgaccggtccctccacctgcattttgtctttcaacgaatgggtctgtatgtgcctgcgggtggttaacccaccaggtaccaaaagcacagcgtatcaggcctgcagccaacgagaaagaaaattggaggaagaaaaatacatacatgtggggctgggtgtggcggctcatgcctgtaatcccagcactttgggaggccaaggtcgggggatcacttgaggtcaggagttcaagaccagcctggccaatatagtgaaaccctgtctctactacaaatacaaaaattagctgggcgtggtggcacaggcctgtaagatcgcaccactgcactccagactgggcgacagagagagaccctgaaaaaaaaaatagaaaaagaaaagaaagggaagggaaagggaagggaagggaagggaagggaagggaaagggaaagggaaagggaaaggggaaggggaaggggaaagggaaagggaaggaaaggaagggaagaaagaaagaaggaaagaaagaagaaagaaagaaggaaagaaagaaagagaaagaaagaaaggggaaggaaggaagtagagagagagaaagaaagaaggaaggaaggagagaaagaaagaaagaaaaggaaggaaggaaggagagagaaagaaagaagaaaggaaggagagggagaaagaaagaaagaaagaaggaaggaaggagaaagaaagaaaggaaggaaggaaggaagaaagaaaatacatacatggccaggagcagtggctcacacctgtaatcccagcactttgggagaccaaagaggaagagaagactctatctccaaatacagtcacattctaagggaccgggagttaagacttcaacataggaatttggcaagggactgaaggggacataatttggcccatgggtgtccaatcttttcatttccctggaccacattggaagaagaattgtcttgggccacacataaaatacactaacactaacagatagctgatgagctaaaaatcgcaaaaaaaaaatctcatagtgttttaagaaagtttacgaatttgtgttgggtcacattcaaagccttcctgggccacatgcagcctgtgggtggcgggttaaacaagcttgatttagcccataacagccacatagtatggctgaccatttgtgtgactgaccttagctactcagcctcaagcccctcgagaggtcaaactgacacagtgaggcccaaggcctccaccataaaacacgtttttggcataaactctctggtgtgacctccaggtatacaaagagactctcatcacacaggatactccaccagcttgaaggcaactcttcaggagccagacaagggctagactttactttggaatgtgcaggagagcccagaagcatgggaggaaggaggcaggagctaagcctgatgtgggatctctgtcaaagccctgcccacccagccacctgtcctcacctgatcagccacctctctgcaggctgctcctgcttcctctggtacacccagcctgtagagtctagggggtccacaccagcacaccaggtctgggagctggacatcagataagctttgtttaagagacagggcctcagctgggcacggtggctcacacctgtaatcccagcactttgggaggccaaggagggcagataacttaaggtcaggagttctactaaaaaatacaaaatctagccaggcatggtggtgggcgcctgtaatctcagctactcaggaggctgaggcaggagaatcgcttgaatctgggaggcggaggtttcagtgagccgagattgcgccactgcacttcagcctgggcaacaagagtgaaaaccctgtctcaagaaaaaaaaaaaaagagagagagagacggggagagacagggtctcgctctgttgcccaggctagaggcagtggtgcagtcatagctcattgaagcctcaaactcctgggctcaagtgatcctcctgcctcagtctccagaatagctgagactacaggtgtgaaccaccatgtccagcttggagagctcttggcatggctgcagtggccagttgctgagtctatccctgaggctgtgcaggggcctagccagcaggaaagctccacagccttgcagctgataaacagagaccactctggaggtggcatggagcaactatggacccctcctgcacctcagtttcagctctatagctgtctggccagatttttccaagggtcaatgggaggctctggtcaagcaatgctgtaccactgactgtcacccaggtgagactgtgccctgcctcaggaagctgctttatgctaacagaattcataaccatttcattatatacaatcatcccctctccctccagctcctgaatgctactgtgatggatatctctgggcagccacccctttgctggttcctctgaggtctgacttccagccagggaggcctaggcaggctgaggtattcaccttcttctcctggaagatgccagatagacgcaagcctcaggtgtggaaacaaatgggaatgaccacagcgggtggaggaagcttgggtcctgctccccaaaaccttctctatctcccatcccccaggaactgagcaccccagggagctggtagaatggagatgtagccccacagaaccacgccccatgcccatagccttgaaaacagcctaatttattattccctttgcacatgaaacagaggcctagacagaatgtctgtgtttggagtccaccagaagccaaccttgagacaaggattcaagtatttaggaaataaacaggaaatactgtaagtggggtggatatgtgggagagggaagggaaggaagtcagcaaagagtgtattgataaccaggtttctacagtggacagctggagctcaatcccgtgggtgaacactaggggtcagtgtagaacatgaacctcaatcatccaacacaagggtgagggagctggggtatttatccatcaattccccttgactaccacagaggtgctgagctctgcccaaaactgacaggaaatggtcttttggtctttcaactaattggtctatatgtgtctggggctggttaatccaccaggtaccaaaagcacagcacatcagacctgcagccaatgagaacatttaggggaaagaaaacacacacgtggccaggtgcagtggctcacacctgtaatcccagcactttgagaggccaaggaagaaggatcgcttgaggtcaggagtttgagaccagcctgggcaacatagcaagatcctgtctctacaaaaaaaatttaaaagctagctgggtatggcagtgcatgcctataggcctagccactcaggaggctgaggcaagaggattgcttgaacccagaagttcaagtctgcagtgagctatgatcacaccaatgcacaccagcttgggtgacagagggagattatgtctctaaaaataataaggccaagcacggtggctcacacctgtaatcccagccacttggggggccaaagtgggaagatcacttgagcccagaagtttgagaacagtctaggcaacatgatgagaccctatctccacaaaaaaatagaaaaatcagcctgtggcatggtggcacatgcctgtagttccagttgcttgggaggctgaggcaggaacatcacttgagcctaggaggttgagggtgcagtgagttgtggtagtgccactgcactacagcctgagcaacagagcaagaaaaataaataaaataataataataaagtaaataaaaataacatgaaaataatttttaaaaaatttgagacagagtcttagtcacccaggctggagtgcagtggcacgatcttggctcactccaacctctaccctctgggttcaagcgattcccctgcctcagcctcccgagtagctgggattacaggtgcctgccaccatgcctagctaatttttatatttttagtagaaacggggtttcaccatcttggccaggctagtcttgaactcctgacctcgtgatccacccgcctcagcctcccaaagtgctgggattacaggcatgagccacagtgcccggccatgaaaataaatttttttaaaagaaaagaaaatgggccaggcacggtggctgacccctgtaatctcagctctttgggaggccaaggtggatggatcacaaggtcaggaaatcgagaccatcctggccaacatggtgaaaccccatctctactaaaaatataaaaattagctgcacgtggtggtgtgtgcctgtaatcccagctactcaggaggctgaggcagcagcatcgcttaaaccagggagtcacaggttgcagtaagccaagatcgtgccactgcactccagcctgggcaacaaagcaagactatgtctctataaaagaaaagaaaagaaaatgtacgcatacaggctctaaaatctgtacagcaactagcaaaatccacaggaataagcatacaaacatcattatgaaacttagaattcataaccatttcattacatacaatttgcagataatctgttctcacttatggaaatttctgattgctaagaaagaatcagagccaatggtgaattaaataggctacatgcaggcaaataaagacaacaggaaaagtacaaaaactcaaaaagatttacacaaaataataataataaatatttatgtggtatgtgggtgtcatatgggtggggctaagggttgctctcactcccatgtcagaccccagctcctctgagactctgaaataccccattgggaccttagtcctgcagcctctaccctcaacttgtaaacaggtattgtcttgacccctgacttctttccccattgtcaatagctgcctcaaagacatctgcgcagggatctcatagggaggagggtgcactccacccttttacagactgatgccccccaaacacacatatccaagaaaagtgaacagcacctaggagaactgtatatcaacagttgtataatgagtataccaatatatgcataatgagagtcccagaaggagagaagtgaaaggagcagaaagaatatttgatgaggctgggtatggtggttcatgcctataatcccagcactttgggaggccaaggtgggcagatcacttaaggtcagaaatttgagaccggcctggccaacatgacgaaaacccatctctactaaaaatacaaaaattagctgggcatggtgacaggcacctgtaaccccacctacttgagaggttgaggcaggagaatcacttgaacccagaaagcagaggttgcagtgagccaagaccatgcctctgcactccagcctgggcaacagagtgagactccatctcaaaaaataataataataatatttgatgaaataatggccaaaaaacttcccagaagcccagaattgatgaaagacatgaatctacatatccacaaagctcaacaaactccaagtacaataaacacagagaaccacacaaagacacattaaaaccaaacacacacagcctcctcgtccaggcctcttggacaccccctcctatacagacctccatcacctgacacctgatctcctacctgaatattcagcagtgaacaacatagacaagcatcacttgatcacttggtggagacccagtctggacgaggaggcagataaactagaacaaaccactgggactgttaaattcaagttgtggcaagtgttagaagaaaggaaactgagtaatgtgatactgactagacagaggtggtggacagaaagggtctccctagaaggtgccattggacctaaaggatgagagagaggtggcctcagaagaaccagggcttcccaggcagaaggaaccatgtgtgcaaaggacctgaggcagaaatagcttgatatgaaggagaaccagaaaggaggccatggtgagtgaatgggacagccaaagagatgaggctggaagtcttgtgagaccatgctgggaatctgaattttattctaggtgaggtgagcagtcataggaacactattcagcaggatggtgccacaatctgatttcagttttaagtccactgtgggtaatatatggagaatgaaatgtagggctaagacaggttatattttcccagatggccacaatatctcccaccctacatccacttgtacaatgtcaccttgacatgcctcccatgtagagaggtataatctgtgccccctttccttgaatctggtggcagaagtgacacagcatgacactcaaggctgggtcagaagagatgcaacttcttccttgttcacttttagagggctgggtggctgtctaagaagtctgactaccccaagaccaccatgctggaaggaaacccgaaccacacggagaggcctgtgtagctaccctggtccacagccccagcaacagctggcgtcagttgcaagacctctgagtgaagacacctccagatgactcaggaccctgccattttttagtcaccctctagcctaagtctcccctgtccaaactgaaccacagcatctgtgagcatcatgtaaaccaaaaggtatctcagataagtctcaataaatttagaaagcttattttgccaaggttatggacatgcctgtgacacagacttagaagctcctgacaacataaactagggtagtcagggccactaccttgattcaggtctgtaatcctagctacttggtaggccaaggcgggcagatcacttgagaccaggagggttttttgttttgttttgtttttttgttttgtttttttgagacggagtttcactcttgttgcccaggctggaatgcagtgacacaatattggctccctgcaacctccgcctcccgggttcaagagattctcctgcctcagcctcccgagtagctgggattataggcatgcaccaccacccccagctaattttgtgtttttagtagagaaggggtttccccatgttggtcaggctggtctcgaactcccaacctcaggtgatccgcccgccttggcctcccacagtgctgggattagaggcgtgagccaccgcacccagccgagcccaggagtttgagaccagtctgggcaacatgatgagactctatctctacaaaaagtagggaaattagccaggtatggtgacacatgcctatagtcccacttgctcgggaggctgaggcaggagcatcacttgagcccaagaggctgagactgcagtgagctgtggtggtaccactgcactccaccttggtctagttttatatattttagggagacatgagacagcaatcaatatatgtaagatgcacatgggtttggtctgggaaggcaggacaactcaaaagtagggagaaggcttccaggttataggtggataagagagaaacaattgcattctttcgagtttctgactagcctttctgaatatgcaatttacagagatagtcacttatgccttagtctggcttagtgaaacaaataggtaaggaagcgatcagatatgtgtttgtctcatgtgagcagagggacaattttgagttctgcctgtccttcatccataaggaatttccttgtaggcaaattgtgggggaggtatgtagctttttttttcttttcttttcttctttttttttagacggcatcttgctctgatgaccaggctagagtgcagtggtgcaattttgattcactgcaacctccacctcccgtgttcaagcaattttcctgcctcagcctcccaaatagctgggattaccagtgcccacccaccatgcctggccaattttttttctttttcatatttttagtagagatggagtttcaccatgttggccagcctggtttcgaactcctgacctcaagtgatccgtcgcctcagcctcccaaagtgctaggattacaggagtgagccaccgcgcccagctagcttttttaaccttgtagctatcttacttaggaatagaatgggaggcaggtttgtcctacacagttaccagtttgacttcttccttttggctcagtgatttggaggtctcaagatttattttcctttcacaatcacgacatggttgttttacatcattacgtttggggatggtttgtcaaacagcagtagtaattggaatttggaggtgagagaattgagtggggaaagagtggcatggggagaccaaggaagaagcttggggtggggtgggtagtggggacggtcattgaaacgaatgacactacggcttgcaccaggttgaagcagtacctggcaaggagagagaggatacgtggaggctgcgatttggagacagacccaagagaacttcctggatgccatcacccagagtcccatccagggagggtgggtgaggtggaagacaagggatcgggcctgcgccacgatcgtcacgtcccatcgaagctggagcggatccgggcacccggagcccccattccaacccctcccggccccaggcaactacatctcccagcatcgcccgctcgggccgcgggaaaggggaaaaaaaaaaaaagtttgggccaagcattcccggaatgtgcttcctgctggcgcggggcggggggcgggcggggaggcccgggcggggcggggagggcgcggggcggcgcggccggagcccggggcgcgcactcggctcggcccggcccgggccgcagcatggccgagccgctactcaggaaaaccttctcccgcctgcggggccgggagaaacttccccggaaaaagtcggacgccaaggagcgcggtaagcggagatcggtggggaacagggggcgccgagccccacccggcctgggagcggggtcccagggccccgaggacagacggtgggggggatcagggggagccccccgcaccccgctgcagactggggtgcctccagccaggggagggtaggggtcctggaaggaaggggctgggagggaggggggcgcggaccgttatgtgctgctggccggggatgccagcgctgcgggctccttgggaggcccgggagggggcctcgcccacgacaggaaatggggccgcgactgagggcctggagggtggaggggaggaggggctgggaggccgggacactggggcccagtcgggctgggcaaggggcatcgggagccctggaggcgcaggatgggagatgggaggcgtactcctgcaaaggaaagagaggggcggcccgtcaatcagagtagctgccccctccgcctcccacctactaacagtgacggcaactgcgcctgccttagccccaggaaactgtcccttttatacagatggggaaactgaggcacggagcaattgggtcatgtgcccagggccatcgacttaaacagctctttggactatgctacaaacagagaccctagagggtggacatcagaggtggccagaggaggagttcagcagggtagcaagtaaaaaccttagagaaacagctgcgtgggatagggggacccaggaaggaaggagttaaaggaggaaggccagaccattccatggacgtaccccttccccccaggccttcccaaagattcccaatgttcccagggaagggagaagggacagagatgcccaaacacaaacacacacaggaaacagcccaggacatgagacaggagaggagggagggaaggggaagtcccaaagcattgagcgtggggggtctggcctgggctgagggacaagggcccatcccaggatggcgacagagtttggaagacaggagggagggtaaaaggggcaggggactgggagtgactgtgctgcagggaatagaaaacccagctcctcactcctgagcacgtagtgcctgctgtgggctgtatacttttccaaaaggctcctggaagcctccctggacatggaaatcacatccccccatttcacaggaggatactgagcctcagagagggaagcgacttgcccaaggccacgcaggtgcaaagctccatgccacggttattgagagggtagaggaagtggagactggaacgcagtacctacgggccccaggaagcctgacttagaaccctgaggctgcagggatggagtccccttttgggatgccagggactgagtagggggtgctctaagctgataactgagatcgctagcctgtggctgcctattccaaacaaaacagcaggatccaaggaaccatgacttatcaggggccggccagggccgtacacagcatcccacccactgatcaattgcacagggctgctctgcaggcagtgaggggctgggtgggtctcactccccttgctctctgccaggccacccagcccagcgcccagagcccagccctccagagccagagccccaggctcccgaagggtcccaggccggagcagaggggccctccagccccgaggcatcaaggagccctgcacggggagcctacctgcaaagcctggagcccagtagccgccgatgggtgctgggtggggccaagccagctgaggacacctctttagggcctggggtacctggcactggggagcccgccggcgagatctggtacaaccccatccctgaggaagaccccagacctccagcacctgagcccccggggccacagcctggctcagctgagtcagagggcctggccccccaaggtaagaacaagcttcccatccccttccccaaggtgagcaccagctccacatcccttcccttcagggtagcaccagcctcacactccctcctcccagaggagcaccaacctcacactccttcccttcaggggagcaccagcctcacatccccaccccgtcagatgctcccagaggagcatcagcctcacaccctcctccccgccaggggaacaccagcctcacactccttcccttcaggggagcaccagcctcacccccctcccctaagcccaggttcctggaccctgaagtctgctctccacacaggtgcagcccccgccagccccccaaccaaagcctcccgcaccaagtccccgggccccgccaggcgcctctccataaagatgaagaagctgccggaactgcggcgccgcctgagcctgcgaggcccccgggctggcagggagcgcgagagggctgcccctgcgggctccgtcatcagccgctaccacctggacagcagcgtggggggccccgggccggcagcagggcctgggggcacccggagcccgagggccggttacctcagcgacggggactcaccggagcgcccagctgggcccccatcacccacctccttccggccctacgaggtgggtcccgcagcccgggcacccccggccgcactctggggccgcctcagcctgcacctgtacggtctcggggggctgcggccagcgccgggggccacccccagggacctctgctgcctactgcaagtggatggggaggccagggcccgaacagggccactgcgaggggggccggacttcctgcggctggaccacaccttccacctggagctggaggccgccaggctcctgcgcgccctggtgcttgcgtgggaccctggcgtgagaaggcaccggccctgtgcccagggcaccgtgctgctgcccacggtcttccgaggtaggacatgcggctgcaggggaggaggggcagggacccccaaaccccaccgccaccccccgcagagtgcctagggggctgggctccgggcggaaggtgtggcctggagcagcgaggccagggtacatgaagcttcagagcacacccggctcaggcccccttgtgtcctcagggtgccaggcccaacagctggccgtgcgcctggagcctcaggggctgctgtatgccaagctgaccctgtcggagcagcaggaagcccctgccacagctgagccccgcgtctttgggctgcccctgccactgctggtggagcgggagcggccccccggccaggtgcccctcatcatccagaagtgcgttgggcagatcgagcgccgagggctgcgggtgagcacccaccccaccccaaccctctggcccccagacctcagaccactcttcaggacaccctatgtacagatgccagacccctacccccaggcctgagccactcctagctccaatcccaacctagacaagggcagaaggcgcccccttgactgtagcaccctgggcagaacccatgggtcatccattgatttaaaaacaggatccaagccctcctggggctcagagtctgatgggggaaaagatacgactctagtcattcacaaatgtaaaactataactgggactggagttggggtggggtgtacctagggtctgggagagcttaaaacaaaacctggggtagtcatggaaagcctcctcaaagaagtgtcagtttcctaagtcaaaggagatggcagccaagacaagtagtccaagcagagggtttacaaggccaggttgtcaaggtagttccaacctcccagcccacaatgcccattgctgcctggcccagaattccagtgctcaccccactgggccctgattagtctgtggccccggcaagaagacattcactctctcttcccacccccaggtagtgggactgtaccgtctttgtggctcagcggcagtgaagaaagagcttcgggatgcctttgagcgggacagtgcagcggtctgcctatctgaggacctgtaccccgatatcaatgtcatcactggtcagcatggccccctctcccctgcctgctcacccccattcaatgcctcacttcaaggccttggggctcctctgggacctcagtcctcctatctgaccttgctttcacccacctcctcttcccccttagctgtgccctccttagccttagaagccagtggtgccctgaccagaggggaccctgtgttcacaggcatcctcaaggattatcttcgagagttgcccaccccactcatcacccagcccctgtataaggtggtactggaggccatggcccgggaccccccaaacagagttccccccaccactgagggcacccgagggctcctcagctgcctgccagatgtggaaagggtgagttgggcctggtgggagtgatgggacttgagagtgggctgataccaatagaatgtttcacccatgcctgggcctgagatgggcatgagctggcagcatcatcatatccccaagaaataggtgctattagcatcccacttcatagatttggaaactgaggcccaaagcaggtgacagttgcccaaggtcacacagccaggatgtgtcaaaaatgcaggctgaacgctgatctttcaacctacaagggaggttcctggctgagggaacctagacaagtcccatccctctctgtgcttcaatatcttcatctgtaaaatgagattcatggcagctctgcttttccaatgcttagttgcctttggcttcagtcttccctccaacaaaataggctcataatactaacatctaatgattaatagtcttaacccgaccacatcccagctatgagactgtgaacctgcttccctactctagccaccttagtctcttgcaggtaggtgccacaggggcctgactttgtctgacttacatcctctcaaccctctcccaggccacgctgacgcttctcctggaccacctgcgcctcgtctcctccttccatgcctacaaccgcatgaccccacagaacttggccgtgtgcttcgggcctgtgctgctgccggcacgccaggcgcccacaaggcctcgtgcccgcagctccggcccaggccttgccagtgcagtggacttcaagcaccacatcgaggtgctgcactacctgctgcagtcttggccaggtgagttcatgcccagggcctgcaccaccaatctgagccaggctgctacagtgatgccaccttaagggaccaatcagtgtcttaggcttgaagctacgccccctcatggagtaaactggtacctggttgcctcagcaaccagttcagatccaaccaatctgtctgttttgtctttttttattttcatttttttgtaaagacagggtttctctatattgcccaagctggtctcaaacgcatgatctcaagccatccttccgcctcagcctcccaaagtactgggattataaaccaaatcaccttgccccacagagctgattcatctttttatttttattttttattttttttgagatggagtcttgctctctagcccaggctggggtgtggtggcatgatctcagctcactgcaacctctgcctcccaggttcaagggattctcccacctcagcctcccgagtagctgggattataggcacgcaccaccagtcctggctaatttttatattttaagtagagcagggtttcactgtgttggccaggctggtcttgaactcctgacctcaagtgatccacccatttcaggcctctcaaagtgctgggattacaggcatgcactaccaatcctagctaatttttgtatttttagtggagatggggcttcacggtgttggccaggctggtcttgaactcctgacctcaagtgatccgcctgcctcaggcctcccaaagtgctgggattacaggcatgatccaggcatgatccacagacctgcccctacccatctttgatgcagtcagaggccctgcctcttgacatgccaatcagaggcctagttgcgtaagcaaccagtcctagctctgccagtgaaaacctgaaagggtcgaaggccgctttccacaggccaatcaggagcctagttccctaagcagccaatcagaggtcggctgtcgcctctttctatgacctaccctgtctcccttcagatccccgcctgccccgacaatctccagatgtcgcgccttacttgcgacccaaacgacagccacctctgcacctgccgctggcagaccccgaagtggtgactcggccccgcggtcgaggaggccccgaaagccccccgagcaaccgctacgccggcgactggagcgtttgcgggcgggacttcctgccctgtgggcgggatttcctgtccgggccagactacgaccacgtgacgggcagtgacagcgaggacgaggacgaggaggtcggcgagccgagggtcaccggtgacttcgaagacgacttcgatgcgcccttcaacccgcacctgaatctcaaagacttcgacgccctcatcctggatctggagagagagctctccaagcaaatcaacgtgtgcctctgagccagatgacggggtgggaccccggttagtaaggaccgggcgcccagtggctaaggcggtgccctggtgaccaaggagagccagacctgttgctcaggccgagctcctggttgccagcgagttaccacgggaccagtcgcgtgtatggctgagactcattcccagtttccagggcccggtatttggacactagttgccaagtctggggcctggggattttagggaccagcggttgtgaccatctttcctgagcaccaagggcttccccttttgttgccaaaaaggtagttctcgcgcttgctaggctggcctctcttgcctccccttggccggggcaacaccagttactgtgagcatcaccctggtgtggtgagtcacctctagtcggccctcttgctgctgccaaccaaatcagtattagctttgagcactgcactgtttctccctcccttggacgacacaaagactagcatgaggcactgtttgtggggggcagcccctatcctgggttccagcatggacacaggggtagcctggggcttatagagaaacagctggtttcccctacccttttccggggaagtccccacgattggcctctagtcagcaaatggagataacagagtctggcctttccaatccccatctccttgccccccccttgcccccccccccgaaaaaaattgagcacttaaacccctcccttttggagggggccccctgaagcgtcaggctgggggcagtctggtacggaacatatttattgcctccatgcatgtgtgtgtgtgtctgtgaggactggtgtgcgtggacacgtctgaagcaggcgtgtggggctctttcagggaccacagaggagggagcagtttgcagtgcccagccaccctgaaatccccaataatggtgcctcagtgggccccagagttccagtgggagagtacggttccctcctgtctccctcttcttttccgcacctccatctttgtggataataaataaatatgcacaggttctgagactgagtacttgggcctacatgggccagaggtggtttattcagtctccataagagaggggacaaacggcacagttgggtccgtgaagaggagggtccaagagctcacaagagagcctctctgagatttgacccctccatcccctcctcagggaggttgtggagtcactgggcctcatgggataggcccagggcaagcaatgatgagactccaaaccagctggacacagtccaggggcaggaaggcagccaagcgtcctgacccacaaggccctatacagcaatggagccatcgcggaagtccgtcctcccaatgaggatgttgaccacaaccgggtggccgtctcggcactgctgctgggcatcgtgcagcaccttgaccacctgatcctcgttctcccgtgagagcagcaagccccgggcccccagacccatggctgccttgtgataatctaaaagaagagattaagtcggatagtggcaaggactcagcccaccgcacatgcagccagcccaggagaggaacacaagcccagctgggactgaaacagcctcctgtcctcccaacctcgctgaggccccctcaccagtgtaggccaggccacaggccacgttgctgcccagagagggcacctgctcccgagaaatctgtgtccagccagcatcattccctaccaaggccatcactgggatctacaggaagatgatgaaggcaggccgcagccttcagccccatggcttggccagccagaggacagagacagggatagggcctctgccagagaggaggctccctccccacctcagcccacccctggtgacatctcccagaaccccaggccctaagcttccctcaggccagcccagtcaccttgtgtctgacgaatgtatcaaattcgatgaggctgtagccaaaagctccgtccccaaacaggcaccagacctagtcgggaggggacccaggatggttagggtggatcaggacctagagagcagcaagtctcccaactccagtgcctcacctcagcatctggccggcacagcttggccccaagtgcaaatcctgcaccaactcccagagtcccaaaggcccctaagaggaccaagagcaggtgggtgtgaaggcgtcctgatggatggtgcccactgccccaggcgggggcccttccttaccaggatcgagccagcgcagggggccgcggggctgtaccagatgggcagcagtgcccacgaagtccccgccatccaccaccagaattgagttgtcaggtagcgtttcctccaccagctgcagcacctgcactgggttcaggtgctgggccacaggcatcgctgccttctccctgcgacaggacagcgaaggtcaccagggttggcagcagggtctgccgggaacccccttcccacatccactccacccaggccccaccgaaaggtctgctccttctgccggtcggcttcccgcagctcctccacccagtctggggcccaggtctggccctgaaggccctccactaacttcagcacgaaggaacccacatctcctggggaaggaagaggacacagctgtggggagctggcttcctcctgttcttccagcatcagaggcctcaaaacagcaggaagccagcagcagcatccgagcaggcagacgggaagcaggccaggggtgctcctagaaaaaaaacaggtgaaacaccccagaacctgccagaaccaggggagggcagcccaggtgaaaagggaagacaaggcccaagaaacaagggttaaggagcacaaggcaggtgacaaacccaagctggcctcgtcccctccctccacctccttctgcctgggaaacactcaatgaaaagagctacatccaccaagcacatctctcaaatccaggcacgtggaagcgcacagcgaacgttactgaagtgaactaacaaacagccccgtgatgtatctttcaccaccccatttttcaaatgatcaaatggaggctctgagaaggtgaggctctgccgctgttcatctccagttcaggcctcctcgcttctgtcctggccattttgagcagcccccctggcctccacccagcccccttccggcctgccgtccatggctgctgagtggaccttcccaacacagatgcaacggtgctacttctctgcttaatacaagagtgtcctgtcgcctaggctgcaggggagtcaacatcctcagaatgatgaaccaagttcaagtccaaggggactaaaataaggggaggggagagatacggcaggaagacaggctaaggggccaacgagtgtgctctctgtcctgagggcagtgggcagtgtgggagggaacgtgatcacatgcacgttttcaagcctccctctgtgtccaccccaccatttgttcctacagaagcatctatcaggccgggcgcagtagctctggtctgtaatcccagcacttttgagaggccgaggcaggaggatcacttgaggccaggagttccacgccaacctgggcaacacagtgagatgctgattccacaaaaaaaaattaacaaattagcctggcatggtggtgcatacttgtagtcccagctactcaggaggctgaggtgggaggattgcttttgagcctgggagtttgagggtgcagtgagctgtgattgcactactgcattccagcctgggtgacagagcgagacctcgtctctaaaaaataaaaataaaaaaaatttaaagaaagaagcattcatcagtttgagagccaactatttgtctctggttgactggctacccctagggcaaggtctgggcctcaatcactgtaccaggctcaagccagctgcagcagaaaccaggaggagagggactgggaggagcacatatgtgtacggggggattaaggggctcaccctgcacagcctcctggggcttccagaagatgtctgagttgagcaacatctcttcccgattacgattgacgatgatgatcttgctgctgtggctgaggacacggccataggataggcggaagtcacacacagttcctggtgtgggggacaggaatgcagtaggcagaggccccatgtcgtctaccttacttgatccactgtggtggactggatgcaaatgagtccctgttcctcaccgagtctccctgcacctgtgccacctacagtgaccttgcagctccccacaccccctgaatcgggactggcctcatgacatgctttggccaacaggatagggcagaggcaggttatattttcccagatggccataatatctcccaccctacatccatttgtacaaggtcaccttgacatgcctcccatggagagaggtgcagcctaggtcccctttccttgaaagtgacacaccatgacacccaacaaggaagatatgcagtttcttccttgttcacttttagaggcctgggtggggccaaggaatgtgctctctgtctaagaagtctgactaccctgaggccatcatgctgggaggaaaccggagccacacatagagacctgtgtagttgccctagtccacagcccctccaacagctggcgtcaattgcaagacctctgagtgaagacacctccagatgattcaggacccccaccccccattcctgcagactctacttcaagaagccacacagcctccactcactctcttgaataaccgcactctcctagccccatagttttctcatccttcaccaagtcggccagcccaggctagcctactggaggatgagaaacaagggggccatggagacaggggtgaagaactctatgaccccagctgaggccatcccagacgagctgcagggccagccaatccccatacaggtgagcaagcccagcctggatcagcacagctgccttcctgcctaacccaagtgcagactcatgaatgagcccagccaaaaccacagctaccacctaccttataggtggatcttgagaaatcagaaatgcatttttagccattgagtttggggatggttgttacagggcagtagctatctgatacacctattatgcgtctggttgggttcaaagcgctttatgtgaaaatgtgtatcaagtacaataggtgcccactagaccttcctcctccttcgtgtgaagctgggtaacagggtgagggggttcctgggggaaggagggaaaggaagaggctcaggcccacctgctaggacaatgacatccgccttcttcagggccgcactgcggttctcccggatgtggagggggtggttgcggcctaacagcccccgtgccatccctccaaggaagcagggaacacccaaggtctccacggcagccctgggagtccaggcagagcagaggtcagtgtggccggggcctcccgcctccccaagagcacccgaggactggggactgggaacgtgaaaacaagggcagggctggcgcttctcaccgaagcttgtcggcagacgttggggtgagcagggcctgactccccagcaccatcagaggcctcttggcccggctcaggatctccacacagcgctgaacctggagcgagaggtggggatcaaagggctgtctttttatttatttatttttttgagacacagtttcactctgttgcccaggatagagtgtaatggcatgatctcagctcactgcagcctccacctcccaggttcaaacgattctcccgcctcagcctccagagtagctgggattacaggcgcgtgccaccatgcctggctaacttttgtattttcagtagagacagggtttcaccatgttggccaggctagtcttgaactcctggcctcaagtgatccgcctgcctcggcctccctaagtgttgggattgctgctgtgagccaccgcgtccagccaaagggccgcccttgagtcgccatgagcacccaagattaaggccccagtactgactcagggagagggtcagggggccctctcccctcagggagagggtagggtcctcagacacaaaagagaggcaattcacctgctgcggggaagcctgggggatgtccaggggcagcggtccctcgggctgaggctcccaggctcctgcaaagaggttggccaggtaattctctaaatacctgcaaaagggagggggaagaaaccaagttgccagaattaactaactacaaggattccaggatctgagcaaggaaaggggccgggagaaaagccaggagcaaagtggcatggggacagggtggatgagtgacacctcagggacagacgaaccctagtggccaggtcttcaactgcctgtttgccctcggtagcctctggggtccaccccaactccacgtagccccccagaagcaaggaacgcaggctcagcatgccaggattaagcctgtgggtccaacagatgtgagctcaagtcctggctctgtcacttcctagctgtgcaacttagggcaagtgacttcacccttctgagcttccacctctgtcaatgtaaatatgaacctccctccccaggttcaaggatctgtccacttaggacatgaggcgctttgcatgggagttctgaacactgtcctctcctgcttcaaacagggtcttctcggtctccttgctcactgggccccagggccccaactttcctgaaggacctgtgcagggccctggagacacaaagatagatcctgcccagccctcccctcagggggcgctctatccagcgaaagacagacacatgggcattggcaggaaacagtcggagctcagagtcagaagcctctgctttcaccgttaaggacaggccaagacagcacagaagcagcccaggatggaaccgtgggaagccccgcaagtaaagaaaaggcaagggaggctgaggcaggaggattgctcgaggccaggagttcaaggctgtggtgagctatgatcataccactgcactccagcctgggtgatagagtgaggccctgtctcaaaacaaaacaaaacaaaaaaggcaagataagagatagccttgtgagaggcagcccaagagagaggggcaaggagaacaaggggagggactgactgggaagccagggggcaaagtgcattaagaatgaggctatatgaccaaaatggtgaaacctcatctctactaaaaatacaaaaattagctgggtatggtggactgcacctgtattcccagctactccgggggctgaggcaggagaatcacttgaacccgggaggtggaggttgcagtgagccaagatcgcactactgcgctccaacctgggggacaaagcgagactccgtctcaaaaaaaataaagaggccatagaacaaaatcactactgcctgagctgaccctcaggcgcttcacacacatccggagtacaggagcctgactaccttgtccactgatgatgccccgtgcctgtcctggaacctggcacatggctgccgctcgctaaatgtatggaaaggaagggccaaggacaggcaaagggaagggactgaggggaagggagagaaggaggaagaagaggaagaggaggaggagaagaaaggaaaggaagaagaagaagagaagaggccaggcgcagtggctcatgtctgtaatgtttgagaggccgaggagggtggatcacttgaggttaagagttcaagaccagcctggccaacatgatgaaacctcgtctctactaaaaatacaagtattagccaggtgtggtggcgggcgcctgtagtcccagctactcagaaggctgaggcaggaaaatcacttgaacccagggggaggcggaggttgcagtgagccgagatcacgccactgcactcaagcctaggcaacagaacgaagaatctgtttcaaaaaaaaaaaaaaagaaagaaaaggacaaagatgtgagggaaggaaaggaggaggaaggagagggctcgagtctgggctctgccacttttttttttttttttgagacggagtcttgctctgtcacccaggctggagtgcagtagcacgatcttggctcactgcaagctccacctcctgggttcacgccattctcctgccgcagcctcccaagtagctgggactacaggcgcccgccaccacgcccggctaattttttttttttttgtatttttagtagagatggggtttcaccatgttagccaggatggtctcgatctcctgacctcgtgatctgcccacctcggcctcccaatgtgctgggattacaagtgagagccaccgcacccggcctgggctctgccacttcttagctgtgtgactttgggcaagtgacttcacctttctgagcttcctcctctgtaaatgtaagaatgaacctcccttccgaggttcaaggatcatcctttaggaggaggaaaacggagaggacgatgggaaaggtggtgggggaaagggaggagaagaggaaggaagagggaggaggaagaggaggaagaagagatgatggaggaggagaagaaagggaaaaggaggaggaggagggctgtcctgagcctctcccctttgctgcctccacgagggccgccttgctttccctacccacccagttcattcctgcctcaggacctttgcacatgctgttccttctacctggaatgctctccccccagctgtctcctcccagtccacatgtgaatcaaaggaggatgggtgtgggctggaagctgcaggagagaacgggggataaaggagggaatggcaggggtggggctattcaccaggagaccactcggcccacgaggcccttgggtggcttggctggcaccatctccttctggaccatgaagtaggggtacagcacgtcaacgggcagctccacaaacaccggacctgcagggacagggaggacgctgagtccataacatgtccccagcccctcggccccagcactgctcagcatcaccatcctccacctacctggggtgcccgactgggcggcagccatcgcggccctcagggtgggcacaatgtcccgcaccctccgcacagacacacaaaacttacagagtggccggaaaagggacagctgatcaacagcctggagcgcaccccggttctggcaaagacagaggtgtggcagggttatcgcatgagcccttcaagcccccctaggcccccactggcccccaaggactgggtacctgcagcagagtgctggcagccccacccagaagcaggattggggactgagccatctgagcattcttcaccgcagtcaccgtgttggtgaggccagggcctgctgtcactgccgccacgcccaccgtccctggaacacagagcccatcacagccatgcccactctcttggccattcttccacctctgaaaaacccctaccctcacagacactctagcccacagtccaaccagtccccagccctctctgcaatgccctcaccggacaggcgggccatagcatcagcagcaaagacggccgtgacctcatggcgtgtgtccaccacacggatgcccagtttctcacaggccaccagcagcggggaaatgtgcccaccgaccagcgtgaagatgaaccgcacaccatgggccctcagcacagcggccacgttctctccgccatgccggacgcttgccttgtccacctgggcccaaggacaggtggagcaataaagttaaaggccagggcagagggcagctgggaaagggggcaatccccctgccccaggtaagggggcaggagcagggtgagaggtcaagagaagcttggtcttggttaggcatatattatactacatgccaggctcaaaccaaggcataacatcttatcagatcctcttgtcattacatccctcttacagctgaggacatcaaggcttgcccaagtaagactgaaagttcaatagaacccacgctcttaagtgccccactgttacactgcctgtctccaggatggcagggcaatcagggagagaggagagggttatataacccagggggtttggccaggggcacaacgcacgcagagcagatggcagggagccatctgctgtgactcctccctgccctccagtatccttgcagagcctggcagctgggctcctgatcccagcctccctgatgccctcctgatggacgctaaacaggcccagggcttagttgacaggctgccagccaccatgtgcctggcacgggagtgagctgctggcacagactgtgccgaggcctcccaactccagctgcctcacagccctacacatccaaggcttgctttaaatctcctaagtcctgaaggtcagtggcatcactcctggctagcagaggaagcagtagagaagggtttggggagggagaggtcaagcttggtccctgctaggagagaaagggttgaggaaggggtctggagaaggggtaaatttcaaacagaggtgcaaggagtttagggggacacctgtggggtcagctctctccaaacatgtcacctagggcaaaccaccacacaatctctctgagcctcagcttcctcttgcagaaaatgaagacagaaagaacagcacctactttcaaggaaaaggtaaggggtaggtaagaaagtctacagtactgagctcagcagagggcaactgttatgaaactgtcactgccaccccctcgctggagcctgccctctgccccatttatcccatccaggttagggagcacagagtgctgtccatctgttctgtgaaaagagtcactggggaaggaggtaggtggggtgcgagtgccccggcagcggcagcttccgtgttctctcttaccagtggcaaagtccaggcctccatacacagcgtggcaatggagacagggccctggacagaacctcttaccagtccctctggactagtcggggctcgctttcccaccctgcacaatgagtgagctggaagcagcaccacgaggcccctccctctttgactgcccccagcccacctcccattctgtgccccgcaccttgtgcagcagctgatagaagagccccaggcggtgagcggcgcccagcaaggcggccaccagcgtcccgcaggccaggagcaggaaggaggggaataagctcccagcgggggcggcggccgcgggggtctccatgaggtggtacctaagagagaaagggcacttcccagacttgggcgcgacagggaacctctccggaagaaatcgcgccccttctcgcagcaggatccagggccacgacccttgccgccagtttctgtgcggccacgcccccaaccctgccagaccacgccctttgtgcgcctaggctcggggtgaagccatgcctctccgtgacaaggtcacgcccctcgcggggctagccccagtcctttacatcaccaccactcccacccaaactagccaccacaagtcaaggtggcgacgacagcaccacacagttatcttccacttacctacttgtcaatggacaggcggaagccccgcctctctttccacaaccggaccccaaatctcagccccagtagtgagcccgccccatgttacgtcaccaagaggcacgaggtcacgcccccgggttagcgggcgcgaccctccacgcaacccacgcctctcccttaaagagcgcacgggcccgagcctgatccccgaccccgggccaggctgggtcgaggtcacatcgcatcaggatgtggttctcccacaccagctcgacccccgacgctattcaccttcacctccaggatatggcgctgcctccagcagaattcggccccctccgtgtcacgtgacccgggagcgtggccgtgcccgggtggcccacttggctcagcggcgccccgtagtccggcccgatgcgcatgcgcacagtcggagccccgctccggggccacccgaaagagccttgcctctactggccgcctccctcatagaccccgcctccccttgcctttcattggctcgcactgcagacctcacacccattttatgttttaaaaccaggaggccacgcccctcagcggcttcaggagcccagacctttgggggcccaccttccgcagctttccattggccccacggtggaagcccgtaggttcaggccctccgaacacagctcgctttccacaccagcggggccgtaccagagcaagaccatgtctcacaaaataataataatacttaaaaaatggtaaattttatgttatgtatattttccacactataaataaatatttgtgcatgtatatatatatatgtgtatattttttgtataataggtatagtagtaagcaaaggaaattcacactgagtcacattctacaaaatgcctaaccagacctctacaaaactgtcaaggtcatgaaaaacaaagactgaggcactgccacagactagaggagggaaaggagctgtgacaactaaattcaatatagtaccctggactggatccaggaatcaaaaaaaggacaaatttgtggataaagttggtgaaatccaaataaagtttggagttgagttagtagtaatgaaccagtgttaatctttttgtttcagtaaatgtattatggttatataagatgttagcattcagggaagctggataaagagtagacaaaaattatcttgctatctttgcagcttttctgtaaagctaaaaaagaaaaaaaaagtcttaataacaaggatacaattttccagagagagagaaagatgttgtaatagatgtaaattctttcttgggagacaaagctttaacatgctccaagactaattatctgaccaatctctccccagataaagaaagattgtcactaggcaaatgtccaaaaagcttctcagccgaaagctggattattcaacagtccctgaaacaaatatacacagaggacaagtgatttttttaaaaagggaaacaagcctggcatggtggtccatgtgtgtaatcccagcactttgggaggccaagacaggaggatcgcttgaggccaggaatttgagaccaaccggggccaaaaagtgagacccagtctctccaaaaaacaaacaaacaaacaaacttagccaggagaatcgcttgaacccgggaggtggaggttgcggtgagctgagatcacgccattgcactccagcctgggaaacagagcaagactctgtctaaaaaaaattttttttaaaagaaaaaaaattagctgagtatggtggcacgtgcttgttatcccttttgcttgggaggttgagaagggaggattgcttgaacccaagaggttgtgtctacagtgagctgtgatcgtgccactgcactccagctggggcaacagagcaagaccctgtctctaaaaaaaagggggtgggtgtggggcaggggaggaaacaaataccatgtatctaaattgatcgaaatttaaagagaagtgcaacaaattattgagttagagggatacagtaagggcctctcttaggacaagcagaaggactctctaaggaggtgacagttgagcagagagaccaggaggaagtgaggacatgggccccacaaggatctggagaaagagtaatccaggtagagaagatggcacatgcaaaggccctgaggtgttttattaatttcctttgatggccataacacattaccacaaattgggtggcttgaaacaacaggaattaattctcttacacttcgggaggccagaaattcagcatggaggcatcagtggggccatacactctctcgagatctttggggaggatccttaccttctccaacttcaagaggctccaggcattctttggcttatggctgcgtcactccaatttctccgtatatcttcagatggccttattccctgtgcctgcatctccttctgtatcttttttttttttttttttgagacggagtctcactctttcgcccaggctggagtgcagtggcgcaatctcggctcgctgtaacctccacctcctaggttcaggcaattctcctgcctcagcctcctgagtagctgggattacaggcacacaccacaacacccggctaaatttttttgtatttttagtagagatggggtttcaccatattcaccagagtggtctcgaactcctgacctcaggcaatccgcctgcctcagcctcccaaagtgctgggattacaggcatgagccatcgggcccggccctcctcctctacgtcttacaaggatacttgtcattgcatttagggaccaccctcatccaggataggctcatcttgagacccctcacttaactacttctgcaaaaacacattttccaagttaggtcacatttgcacgttctgaatgtacattttagggtctgtcattcaactcattacaaatgggatgggctttgcatgtgcagagaaagtcaggaaagccaggatagctagaaggaagagagcagaggaggcagggaggagacgctatcaaaggctggacaaaggccagacaggtatgattttacagactgcatgaggactgcaaattttattctaagtgaattggaaagccagagaggattttgaacaatatgcaaccacacacaatctgcacatgattattcataggtgctttagttgcaatagctgaaaactggaaaaaataacaaaaaacaacaaaaaaaatatcccttaagagaggaatggttaaacaaactgtgattcacccataccatgaaacactgctcagcaataaagagggcaaactactaaaacacgacaggccaggtgcagtggctcacgcttgtaatcccagcactttgggaggctgaggcgggtggatcacctgaggtcaggtgttcaagaccagccagaccaacatggtgaaaccccgctctactaaaaatataaaaaactagctgggcatggtggtgggtgcctgtaatcccagctactcaggaggctgaggcaggagaatcacttgaacccgggaggcagaggttgcagtgagctgagatcgtggcattgtactccagcctgggtaataaagcgagactccatctaaaaaaaaaatatatatatatatgtatgtagtcaggcatggtggcatgcagctgtagtcccagatactggaggctgaagcaggaagatctcttgagcccaggagtttgaggctgcagtgagccatgattgtgcaactgcactccagtctgggagacagagcaagaccctctgtcttgctaaaaacataaaatacaacaaaacagaaaagcaaagaagcacgcaacactttggatgaatctcaaaataagtagcctgattgaaagaagccaatcttggccgggcgtggggctcatgcctgtaatcccagcactttggaaggcggaggcgggtggatgacctgaggtcaggagttcgagaccaccctgaccaacatggtgaaaccccgtctctacaaaaaacataaaaaattagccaggtgtcgtggtgggcgcctataatcccagctactcaggaggctggggcaggaggatcacttgaacccaggagacagagtttgcagtgagccaagattgtgccattgcactccagcctgagcaacaagagcaaaactccgtctcaaaacaaaaagaaagaagccaatttcaaaggtaccattaatatgatccatttatatgatattctccaaaagtgacaaaaccatactatgggaggaaagatcagtgttgccaggggttagggaagggtgttagaataaagggggtagcatagaaggttttgggggtgatagaactgttttgtattatggtggctgcatgtgttaaaattctaattatgatagtggttacctatgttaaaatttttattgaactgaactctaaaaatttcaattttactgcatgatcctttaaaaactaaaattacgtacatataattttatacatatatgtgtaaataaatagataattatatgcacacacacaccgtccataaataaatagaattgtttaaagacacactggcaccaaaccaaagtgatcccttgaagtaaccagaagatttgaaagagaactggaaaagggactcaatttctgcctgtgcaattcaaaggtgtctttgatgttactcgcaggaaacgctgctgttaagtgtttcaagtctggggaagcaatgcgcttaccacaccctcatatccttgtcaatgcttatttttatgagtttcgaagtaagtatagagtctggaaatgtcacagagggaagcgatcatcaatgtcaagtcctctctttgatgacttgtgagacacagagcggggtgatctctgcaagtctcagcaagtggttcagtactaaactggttcccagatttcctgactcttcccggtgggcatgaaatccctgtgtttctaaacgctcctacagccttcgagaaggctcctaaggcacttagagctccttctaaactgatgcaggcccctaatcctggctttcatctccttgagccaaggacagcatcacgtaggcttccaaccgtcgtcatgaggtgtgagtcataccggcctccacacctgtaggaggtaatgcctaacagggagtgatggaaccggtatttccatccactcaagcaaataaatgaaaaccaacaagctctcaccactggggaaaattaaccatccacagaaaccacgaaaacattactaaaggagttgtcagtaatttataaatgaacagattcccaaaatttaaaaagaaaaatggagtcatcctacacaactttcaatgtgcttaacatgccccttaaaattgaaaatgaggctgggtgctcatgcctgtaatcccaacactttggcggagccaaggtgggaggatcacttaagagtttgagaccagcctgagcaacttagaaagattccgtttctacaaaaaaattttaaaattagccaggtgtggtggtgcgcacctgtagccccagctacttgggaggctgagatgttgcttgagcccaggagtttgaggctgtggtgaactatgatcacaccactgcactccagcctgggcaacacagcaagaccttttctcaaaaaaagaaatattgaggccaggcacaggggttcacgcctgtaatcccagcactttggaaacccgaggcaggcagatcacttgaagttaggagttcgacaccagcctgaccaacatggtgaaaccctgtctctaccaaaaatacaaaaattagccaggcctggtggcacacgcctgtaatcccagcaactcaagaggctggagcaggagattcgcttaaacctgggaggcagaggttgcaatgagctgagatcacgccactgcactccagcctgggcgacagagcaagtctctgtctcgaaaaaagaaaaattgaaattgaaatccaacatcctgggatgagctgacccacagaagctttttggtaatagccaaaaactgaaaaaaccaaaatactcctcgagaagtgaatggttaaatgtcctacggcacatccattccatggaatactactcagcaatgtaataagcatttattcgatattatactttatgtattataaaaagaaaggcaattatcattggcagagaagagagtcatcctccaaaatatggacctctttagtcatgcctaatggaacatagtataagaattattattcccttaataattattatttccttcctagagagaaagttatattagctaatcataaatacacagaatctagaaattgttctaaaactttatttttctcagtggggcgcagtggctcacgcctgtaatcccagcactttaggaggctgaggcgggtggatcgcctgaggtcaggagttcgagaccagcctggccaacatagtgaaaccccgtctctactaaaaaatacaaaaaattagctgactgtggtggcgggtgcctacaatcccagctactcaggaagctgaggcagcagaatcgcttgaacctgggaggcggaggtagcaatgagctgagattgtgccattgcactccacggcaacaagagtgaaactccgtctcaaaaacaaaacaaacaaacaaaaaaacctttatttttctcttgaggctcccatcagactacctgggaaggagatcttcgctcctgtctccctttcctttcctttctcttatccctcatttcctttgggtttggttttttttttttttttttagtactaactgcaggatcttggctcccagtgaattggctaagattgtgaagagtattgacagcttggggctgaatcctagttttgcctttcagttgcatttgatattagacacatttcttttcttttcttttttacttcccatgctgcactgatgtaacttttttttttttttttttttttttagtttctaatttttgtgagtacatagtaggtgtatatatttatggggaacacaagattttttttttgtatccattaaccatccccacttccgtcccaccccccaccacccttcccagcctctggtaaccatccttctactctctatctccaagagttcaattgttttaattttagctcccacaaataagtgagaatatgccagttccatctaaattgttgcaaatgacaggatctcatttttttatggctaaatagtactccattgggtataataagtaccccaaagtccactatgtcatactttttttttttttggaggtggagtttcactcttgtcacccaggctggagtgcaatggcacgatcttggctcactacaacatctgccttctgggttcaagtaattaccctgcctcagcctcctgagtagctgggattacaggcgcccacaaccatgtctggctagtttttgtatttttagtagagacagggtttcgccatgttggccaggctcgtcttgaactcctgacctcaggcgatccacccacctcggcctcccaaagggctgggattacaggcatgagccaccacactcagcccatcgtgccctttaaaggaaatgtatatgttcctttgagcctttaagtttctcctatagcctgggataaaaatgtatggttgggctgggcgcagtggctcacacctgtaatcccagcactttgggaggccgaggtgagtggatcacttgaggccaggagttcaagatcagcctggcgaacatggagaaaccctatctctgctaaaaatacaaaaattagccagtcatggtggcgtgcgcctgtagtcccagctactcaggagactgaggcacgagaatcacttgaacctgggaggcggaggttaaagtgagctgagatcatgccactgcactccagcctgagcgacacagcaagacccttgtctcaaaaaaaagtatgattggagctaaagaagcaactttggactcagacatggaagctatgatttaaggaaagcactttaccagccctaaactacccacctccagacctgtacatgagcaagatataacttctatccaggttaaactactctattttaggttctcgttgttacagcagctcatactgtacaataatttaaaagttagcaccaagagtggggttttgccctaataagtaccagatgtggggttttgccctactaagaaccagaactggggttctgctgtagtaaaaacctgaactgtaaggcattaacttgaccatcagacagcaggtcatgaagacacagatacaaggtgaggatctggtgatctatgttacattatggcagaccactaggtaaaactgtgatgtcttgaatgacagagcaggcaccgatggagtctccaagctttggagatgtcattggaagaacccagactatttgtgtgtgtgtgtgtgtgtgtgtgtgtgtgtgtgtgtgtgtgtgtgtgttgactacttctggctactattaataaagagagagatatgtactgtagaagtggagatggaaaggaatagaattgtatcagtgaggccgggtgtggtgcctcacgcctgtaatcccagcactttgggacgccaaggtgggcggattgcctgagctcaggagttcgagaccagcctaggaaacactgtgaaacactgtctctactaaaatacaaaaaattagccaggcatggcagtgggcgcctgtagtgccagctactcaggaggctgaggcaggagaatcgcttgaacctgggaggcggaagttgcagtgagctgagatcgcgccactgcactccagcctgagcgagagagcgagactctgtctccaaaaaaaaaaaaaaaaaaaaaagaattatatcaagggaggctctttctccatgcaggctacagttgaaatgaactgacggtggtgattcagggcctcacagggcttcaaagcaaaacacctcctgcacccataaaatgaagcatccatgcaagatggctctgatgaggcaacgggttctcagcagcttcccacttggaagtctcttctagactgtgagagtcagcccaggagcaagagtactgcctcccctctcaactctgcctttcaaaaagctaagagtagctgtcactaacatgagagaatatccccgggcgcggtggctcatgcctgtaatcccagcactttgggaggccgaagcgggcggatcacgaggtcaggagatcgagaccatcctggccaacatgttgaaaccccgtctctactaaaaatacaaaaattagctgggtgtggtggcacgtgcctgtaatcctagctactcgggaggctgaggcaagagaatggcttgaacctgggtggtgaaggttgcggtgagccgagatcatgccattgcactccagcctgggcaacaaaagcgaaactccatctcaaaaaaaaaaaaaaaaaaagaaagaaagaaaataaaaaaagataagagagtaccaaggtccaggcatagaggctaggaaataaaggaggacagagttaaggtttaagaactatgccagagaagatattgataattggctctcgctccttgcatatgggcctgcctggagacaagaggatggaaagtctactaaatttttgagatctgcattgtcaaagaaactatataagtctggactgctttggcacagtcttttgactgtgattatttgacattaaaaagaaaatcttggtggggagcaatggctcatgcctgtaatcctagcactttgggaggctgaggcgggtggattacttgagatcaggagttcaagaccagcctggccgagtagtgaaaacccatctctgctaaaaatacaaaaactagcctggcgtgatggcgcatgcctataatcccagctacttgggaggctgaggcaggagaatcacttgaacccggaaggcagagattgcggtgagccacgattgtgcccctgcactccagcctgggttacagatggagactccatctcagaaaaataaaataaaataaaataaaataaaataaaaaaatcttggccaggagcaatggctcatgcctgtaatcccagcactttgggaagccaaggcaggggaatcaattgagcccaggagtttgagaactggcctaggcaaaaaagtgagacccaatctctgcaaaaaattaaaaaaattagccgagcatggggttgcatgcctgtggtcccagatacatgggaggcagaggtaggaggatcccttgagcccacaaggttgaggctgcagtgagccatattcacatcactgcagtccagcctaagtgacagagaaagaccctgtctcaaaaaaaaatctgtatcatgaaccccctcaaaattgtaccagcaagaaacgagaaaacttcagaaatggctttggggcatagaagacaatgaagggccccactagcgggcaaaaccaaggaccatggaggacaatggacaaacaacttactctctggcaaggctgcccttcaaggagtcttcacaatttctgcctgataaaatttgcatttgttttgttttgttttttacagactgggtctttctctgtcgcccaggctggagtacagtggcacgatcatagctcactgcagtctcaatctcctgggcccaagcaatcctcccatctcagccttctgagtagctgggaccacaggcacatgccaccacacccagataatgttttgtttttttgtagagatggggtctcactatgttgcccaggctggtctcaaactcgtggcctcaagcaatcctccaacctcggtttcccagagtgctgggattacaagcatgaaccactgcacacctagttaatttctgcataatgaaaatttcatattgcggttcattgacttttgtgtgtttcccacgcttccattgaagtggaggttttttattgtttgggaaattgggggcagaggtgtttgtttgtttgtttgtttgtttgtttgactatggttttaccacttatactgcatgtagactagagggagctttttaagtttgtaggccaccagaccatgagaaaccataccagagctcaatggaggaatgttatatttcaaaccagaccagcgagtggatgagtcattaggctatgtctcttggatagggatggtctgtgtatgagaagaaggaggtgcatgtacactgtatgcagtggcaccagttcatctagctctgcctgtttagggaggtgatttagatatttcagaaccaagatatctacaagacaaataaactcttctcttgccaactcaatgttgctaactggctgcatttcattgcatatctcttttaacttaatttctatttttaattgtggcaaaatacacacaacataaacactaccagtagagtcatttttaagtctacagctcaatggcattacgtacattcacactgttgtgtaaccatgaccaccactcattatcaggacttttccatcttgcaaaagtgaaactccatacccattaaacactcactctccattctcatctcccttaggccatgacagctagtgttctactttctgtctctatgaatttgaatgctctgggtacctcacagaagttgaattatctgggtacctcatagaagtagaattatacagtacttcttattttgttattggcttatctcacttagcatactatcctccaggctcatccatgttgtgtcagaatttccttcttcttaagaatgaataatattctgttgtatggtggtatgtgctataccatgttttgtttattcatccatccactgaagggcacttgtgttgcttccaacttttttggctattgtgaataatgttgctctgaatatgggtgtgcaaatatctcttcaagatcttgctttcaggctttttggattacacccagaagtagaattgctagatcatatgctgaatctatttttaactttttgaggaaccacctgtattagtctgttctcacactattaataaagatatacctgagactgggaagaaaaagagcattaattggacttacagttccaatggcttggggaggtctcagaatcacgacaggaggcaaaaggcacttcttacatggcagcggcaagagaaaatgaggaagacacaaaagtagaaacccctgataaaaccccgtttttactaaaaatacaaaaattatctaggtgtggtggcacacacctgtaatcccagctactcgggaggctgaggcaggagaatcacttgaaccaggaggtggcggttgcagtgagctgagattgcggcactgcactctagcatgagtgacagagtgagactccattaaaaaaaaaaaacccacacaggtttagaatctcaaagtgtctatagatcaggaatcttagttggggcacagctactcacaggctgcaatcaaaaggttggccagagctgcggtcttatctgaaggcacaagtgagtaaggaccctttttctagtttatttatgtggttttagcatgaattcagttacttgaaaactgttggactaagggccactgttgctcactggatgttggctgtaggctacactcagtttcttgcctctccaaataggctgttggcttcatcaaagccagcaagagagagattttgctgccaagaaggatgccaggatctttgtaacacaatcatggaaatggcatccactcaacattttgatattctattggtcagaagcaagttactcaagaggaggaaattatatgaggtcatgagtaccaggaggtgggatcactgggagccatcttagaggttccctgccatactgtctcctcttctgtattttagggctccagtgcctgaccacttgcttccccaacttctagcaacaccttctccccttctagtactagaaaggcattctcctcccatcatatccttatagtaagctttaccctctcttgccatgtgaccatgatgacagaatcatttcagcggaacgtgatttatgggaaagtggcaaggatttcaacaaacacatctgtttaggctgggtgcagtggcacacccctgtaatcccagtgctttgggaggccaaggcaggagaattacttgagcccaagagttccagatcagcctgggcaacatagtgagatgccatctcttttttaaaaaaaattatccaggtgttgtgttgtgtgcctgtagtcccaactaactacccaggaagctgaagcaggaggagtccttcaacccagaagtttgaagctgcagcaagctatgaatgcaccactgtactccagcctgggtgacagagtgagacgctgtctcttaaaaaaaaaaaaaatctgtttagaattttcaaaatagtatccttgtgagtcatataatcatgtatatgtttaaatacacagaatgagcagcagaaatggaaaacagagatgcaaggagaagcattgaaaaggcaaggcacagatgtctacatgaaaagttagagttatatgagataatgactcagtttccccagcatgatcagaagagtattgatggggagagtttcccttaggcctggcctattttattcttaggcaattctacttgtaagtgtatcaactggattcaacaggaaatggaagacacattgcttctgggtaatttaggggaagtttttcaaagggtctgtttgtaatgatgtgggcaaagttaagggctggtgtggcatcccagagctagcaacactggggagctgttaacacttattaatgcctgatggtgcaaggaagagaatgcttacagatgaccagaaaaagtggctgtgtggaagggcctatggcccctaataaagagagcagccaactacagcaaccaagcatctggtatctctatagtctccctgacatttctttccttctgacctccatctcctgacaatgcctccaattggccaaacccaaccagaaaccagagggtgccaagcccatcagtgtggtccatataggttggtctcccgagacaacaagcaaagtagacattttgggacaaatagaaaacacagcacataaagcacagcccatatcatattttcttggagaattttatggtgtcagcttcatcacctgtgttcagcaaacttcccttttcctaattccacaaagtataaaggtaggttattgatttaggatctttcttctttttcaatgtaagcattcgcagctatgaattgccctctgagccctgcttttgctgcatcctataagttttagtgtgttttgttttcattttcattcatctcaatgtactttccaatctaacataatttcttctttgacctcctggttaagagcatgttgcttaatgtctgcatacttgtaaagttttcttctgtcactgatttcttactttattccattgtagtcaaagatactttggattatttcaatccaacaccagcatctaattaaacaaaagttaattactaaagcacagtgagacaccactttacatctattaggattgatatgatttttaaaaacacaaaataggccaggcacggtggttcacgcctataatcccagcactttgggaggccaagatggccagatcatgaggtcaggagttcgagatgatcctggccaacacagtgaaaccccgtctctactaaaaatacaaaaattagccgggcatggtggcacgtgcctgtagtcttgctactcaggaggctgaggcaggagaatcatttgaggtggaccctgcagtgagccaagattgcaccactgcactccagcctgggcaacaaagcgacactctgtctcaaagaaaaaaaacattaaaaaaaacctacttcttagtgtgacaaaataaaagaatgctgaggacggtgtcagtccagatcaatgctactagacacaaccttccacagcccaccctcaaggggctgccttaatggcatcctccactggtgcacatcagacactgcagaccaccgtgcatcgcagccaagtccaggaaatgaagacgaaagaaaaagcatccattcctgagcttatgccaagtctcaggcactattagttgacaaagcctatctcatttaaggcatgggagtgaaccctgtttaccagatgggacaactgagtctgtggaggtacacatgctaataaaaaccctagagtggctgggctcagtggctcacatctgtaatcccagcatttagggaagccaagacaggaggcttacttggggccaagagtctgagatcagcctgggcaacagagtgagaccctatctgtacaaaatcagaattttaaaaattaattgggcacggtggtgaacacctgtagtcccagccatgtgggaggctgaggagggaggatcacttaagcccaggagttggaggctgcagtcagtcatcattgcaccactgcactccagccttggcaacagagcaagaccctgtctccgaaaggaaaaaaaaaaacaaaaaactaaaatagcctgaaacgtagagcaggtttttgtttgtttgtttgtttctgttttgttttgagatggagtttcgctcttgtctcccaggctggagtgcaatggggtgatctcggctcactgcaacctccacctcctgagttcaagcaattctcctgcctcagcctccgcagtagctggaattgcaggcctgcatcatcacgcccggctaatttttgtatttttatcagagacggtgtttcaccacatttgccaggttggtctccaactcctgacctcaggtaatctgcccgccttggcctcccaaagtgctgggattacaggtgtgagccaccgtgcccagccaagcagattcttatttaaaaaccccacggctccacgccagggtcctcctcagagccactctcacctccttgttccacagagtgcacaccacagggttcagcagtggcatcaccaccgtgtagaacacagccaccaagcggtcctggtcggggttggccccggactccggacgcaagtagatgatggaggcgcagtcaaaatgtactacgaccacggtgacgtgggccacacaggtggagaaggccttgcgccggccggctgccaaggaaatcctcacgatggcagccacgatgaaggcataggagaagaggatcgggacgaaggacatcagcaccaccaggacgctcaggaaaaagatgcccagcgccttgctggcactcttggcgcagctgagcttcagcaccggggcgatgtcacagaagaagtgctccacgtggtctccgccgcaaaagggcgatgagaagatcatgctggtctcgatcaaggccaccgagaacccagagcagaaaaccagggctcccaggcagaggcaaacggtgggtctcatgaccatagagtagcgcagggggtggcagatggccacatagcggtcataacccatcagggtaaggaggaagcagtggctgcatcccagacccaggaagaaaaacatctgagcctgacagccagggatggagatggcctggtctccatcagcagatgagccagcatgctggggatggtgaccagcgtgtatagcaggtctccgagagggacagcaccaccaggaagtggtacatgggagtgtggcgggacctatccgcatgggtgatggtgatgatggtgacgttgccaccgagggtgaccaggtaggtaaggaagaacagggtgaagagtgtgttcctcaggtgtgggaggttggagaatcccatcatcaggaattctgtcaccagacaggtcccattttcctgctgcttgtaaagagacagagaggaggcaacagaataggtaaaatagagtgattaataagggtctgcgatgcatcaggtagcagtgtggaaagaaaatcatttctggccaggcacggtggcacacgcctgtaatcccagcactttgggaggccaaggcgggtggatcacccgaggtcaggagttcgagaccagcctggccaacatggcggaaccccgtctctactaaaaatacaaaaaatgtagctgggcgtattggtatgcatctgtaatcccagctacttgggaggttgaggcgggagaatcactcgaacccaggaggcggaggttgtagtgagctgagatcacgccactgcactccagcctgggggactgagtgaaactccatctcagaaaaataataataataattcctgttttgcaaaaactgaaaggggtactcagaaacaataagccctttgttttcctaagagtcacacaactagcaagtgactcttccacagataagaaaatcagaggaatgtatgagaaaatgatatttggtgtgtggaaggaagatggtaagtttgaatttctctagaaacagatgcttgataagaattcaagagaaatattttatataaaagatgatttcaagtgacatacatagggaagtaggacgtgaaacaaggaaggtagataaccaatacaatgtacatcaccaaggaaggtactgccgtgggccactggaatttaatcttatgtgcagaaccgtgggacgtgtccaggaatatacacttctatgtttttttacccaaggtatgagggagcttggggatatatccactcagtcccattagccactgattgaagatttctctcaggaggcattaaagtgccagcacatgccgcttgccatgtgtacagaaaattcaaagtctggctcagcaagaaaaataggagcaacggggatgtaggtgagaattttacagggtctgctatagtccatgtgaaaaagaatatctggccagacacagtggctcacgcttgtaatcccaacactttgggaagccaaggcaggtggatcacttgaggccagaagttcgagaccagcccaaccaacatggtaaaaccctgtctctactaaaaatacaaaaattagccaggtgtggttgtgtgcacctgtaatcccagctactcagcaggcggaggcaagagtattgcttaaacccaggaggtggaggttgcagtgagccaggatcatgccactacactccagcttggacgacaaagcaagactctgtctcaaaaaaaccaaaaaccttaggaaggcaaaggcaaagactgcaaaattgatacctgaaataaaccaaataacactttcaggagaatgaggtcagcaagattgtggaatagaagttttctgcctttacttccttcagctactggaaattgctggcaactgttcaaagtgaagaatgctatcattaatatcaagaccttaggagtgaggctgagatgcccccttggactgaagaataaaaaaaaaaaattcatggtgaaacagtaagaggaatggttctctctgactacactgtccctccctgaggccagcaggacaccatatgctgagagttctcctggacccatggtttttgcagtggaagggatgagttggaagtgaacattcagcttctccatcattctgggattcttcacgggtagcttgctcctatctcgtcccacttgaaatgttgagaatgccggcatggctggacaccaggggtcagttcggtcaaagaacagcggacgaggggctcacaggaaccagttcacaagttttggtacttgcgctgcatccccaccagcagaagtgccgatatggttaggatatttgtccccacccaaatctcatgttgaattataatccctaatgttggaggtggggcttagtgggaggtgtttgggtcatggaggcagattcctcatggcttggtgctgtcctcacaatagtgagtgagttcttgcaagatctggtcatttaaaagtgtggagctattccaccccactctctctctcttgctcctgcttttgttatgggaattgcctgctcccattttgcctttcatcatgagtaatgcttcctgaggcctcctcagaagcaaagcagatgacaccatgaagcatgctggcaccatgcttcctgtacagcctgcagcactcttagccaattaaacctcttttcctcatgaattactcagtctcaggtatttctttatagcaatgccaagaatggcttgctacacttgccacaccatagaaactagcaaacagcatcatgtgcaagaaacatggtgcatgttatttttcctaacaacattaccacccagccagggaaaacaacatccaaccatgcctgatcagagacaattgcagagcccagccagccgccccacatgatggcagagtccagccaggtgcccttaccagactgtggaacacattcagaaataccactcaacctcagagaacaggaagcaactcagcccagttagagaaccccacagcaaagtctgcctgtctggagtttcaaccagccagcccacccagaattccaaactaaactaaataataaaggtctatcacaaccaaattccacctgcaaaggctggaaaggatggctgtctcctcaaatgtaaaagcaactacgtaggacacaggtttatgttttaaaaaacaaacaaaaaaataaaaaaacaaggaaacataacactactagaaaaaaataataaagctccagtaacagacccagaagaaaaggtaatctataaaatgactgaaaatgaattcacaatgattctctaaaagttcaggagcctaaaagaaaatacagatagaaaattaaatgaaatttgaaaaaactttataaacaaaattagaagtttggcaaagaagtagaaacaattaaaagcacaaatagaaatcctaggaagaaaaaaacataataacctaaataaaaagtttgatacaaagtaggattaagagtgtagagatactttatttctgtgatcaaagttaagtggttatcatcttaaaataatcttttaacactataagatgtattttgcaagcctcatggcaagcacaaagcaaaggcctataatagatacacaacaatgaaaaggaaggagtcagtgttcgctttggcagcacatatactagaaatggaatgatacagggatgatcgtggcccctgcacaaagatgacatgcgcattcttgaagcatcccaacataaaacttattttaaaaggaataaatcaaaacatatcactagaagaaagcatttaagcactaagaaaaaaaagtaaatgaggaagaaacaaaaagaatacataaaataactagaaaataatcagcaaaatggcaatagtaagtcctcacctgtcaacaattaccttgaatggacacgaattacattctccatcaaaaaacatggggtgaaggaatagatagaaagaggcacccaatcatgtgctgcctaaaagagacttaattcacctgtaagaaacacagaatgaaagagatggcatggaaaaagatattctagggctgggcatggtggcttacacctgtaatccaatgctttgggaggccaaggtgagcagatcacttgaggtaggcattcgagaccagcctggccaacatggtggaaccccacctctactaaaagtacaaaaattagccagacgtggtggtgtgtgcctgtaatcccagctactaaggaggctgaggcaggagaatcacttgaacccagaggcggaggttgcagtgagttgagatcgcgccaccgcactccagcctgggcaacaaagcaagactccatctcaaaaaaaaaaaaagaaaaagaaaagaaagaaaaatataatccactcaaagggaagccaaaaaaagagcagggattacaatccttatgtcaggaaaagaaaataaactttaaataaaaaactataaagaaacaaagaaaaacattatataatgataaaggaatcaattcagtacaggatacaacaattttaaatatatatgcaaccaacaatggaaaacataaatgtataaaacacatattccctgagggattcatgccatgaaaaagtacaaggccttacttcaaatcttcagaaactgaagtaaaatgaaaccccaagccaagaaactcagactctacttaagaaatccagatctaggcccggcacgatggctcatgcctgtaaccccagcactttggaaggccaagcaggcagatcacaaggtcaggagtttgaggccagcctggccaatatggtgaaaccccatctctactaaaaatagccgggtgtggtggcacacgcctgtagttccagctactcgggaagctgagacagaagaattacttgaacccaggaggcaaaggttgcagtgagctgagatcaagccattgcacttcagcctgggcaacagagcaagactccatctcaaaagaaaagaaaagaaaatccagatctaataaaaagcatactggcagacatgccctaaatatgtctgaaacaggcctttttatggtgaagtaaacaacatcaaagggaagaacagaaccctttatagagaccgtgatagaaactcaataacatggaagacttcacagtgaaaaaataatgagatatgactatttaagaagtataattacttaacatgacaaaacattgttaaattgaaacaaatttataggcaaatcacgaactagaacaaagctgtgataaatgtttacctcttacaaattaagaaaaatgtgagccaggcacagtgactcatgcctgcaatcccaacacttttgagaggccaagacaggcagatctcttgagcccaagagtttgagaccagcctgagcaacatggtgaaacttcatctctacaaaaaaaaaaaaaaaaaaaaaaaaaatatatatatatatatatgtatatatgtatatatatattagccagccataatagcatgtgcttgtagtcccagctactctggaggctgagaagggaggatcacttgagaccaggagatcaaaactacagtaagccatgattgcaccactgcactccagcctaggtgaacagagagcgaccctgagaaagaaagaagaaagaaaaagagagaaaggaaggaaggaaggaaggaaagatgggagggagggagggaaagaaaggaagaaagggaaagaaaggaagaaagagaaagaaaggaagaaaaagaaaggaagaaagagacagaaagaaagaaagacaaaggaaggaagggaagggaagggaaaatgtataggaccactccccaacattcatggagctcaaataaagacccatataccatgtgactgattatttaaagttaaaagtgaagctaataaacagttaagtaaaatatgctctaactcatcacactgacagccttcataatgacatgaaaaaacagaattcaatttaggatttctggactctttagagttccactccagaatgtgatgctgtggagagcaccgtgtgctagtttctagcccatgtcctatccccttctcttcccaccccaggtgccacttagcactgcgaggggccttgtatgtatgtgtacagatatcccaaccatgcaccttcaagatgcagcaacaccctccttaactacaccactgcttaaccacacctaaggaaatacacgccagcagtgtggttcatatcagaagaaagaagtcctacttttggccctgctagtggcttggagccacctgggcagggaattctagggtcatgtagcgcatcatctacaatgaggtgcaagctcaaggtaaagacatactcttgactttgtaaactcttcaccccttgggatggggtagagtcgagtcctcagatgcatcagtgccagggcagaatccctcttgcccaaggctaacagtagtcctctaacaccccagtataaaatcagcagatgaccctgatttcattatgatataatgtatacatggattgaaacatcaaactgtactccataaatacatagaattattatgtgtctgtctagataatttcacctctagatttttctcattgaaaaataactgcacttagatatataggaatgttcataactgcattatttaaatttttaaagaggacatgacctaaagtgttctatagtcgaaatgcccttacaaacaagggtaaaacaaaatactgacattctaattgaaaaagatacaaagcacaaaaataataagacattattaaagtcgtatctttgagaatggataataacatgggaagaattctcatatatgggttgtgtgagagtgggatacgaaacagtaaaaattctgtgatgacattcgcatacattctttatacttttttgaatttcccaaatattctacatcaattgctaatttgtatcaatagaaaaataacatttcttagaggatattttttctcttgataaacccttttcctgtttaatcaatctagtttgacagaggaagccaagggttgagataaacaatgcaaaacatgctaaagccatttgtaactaaagtgttttgttttgttttgtttgaaatcgagtctcactctgtcgcccaggctggactggagtgcagtggcacaatctcacctcactgaaacctctgcctcccggattcaaatgattctcctgcctcagcctcccgagtaggtaggattacaggcatctacctgccatcaagcctggctgtcatttgtaattaaagttttaagaaataatctgaagagcaagtgactgtggaagagaccctttaaggtattatcacaggctcccttcaggtataagtcagcaccctcttgggcatcacatggaagggaattggaaaggaaaccccccttgatatttgctcagtgtaggagtgtcctctaccacaattatcctgcctccacttgcttgcctccagtgatgagaagatcactagctgcaaaaaaatgcccattacctagagcagaaatttcatgctcaaggacagcccctcagtgaccagcagcaataccaagtagagctctgtaatatcacaagcctagatttgaatgctggtgccttaccaggaacagggtgaccttggtcagctaattttgctcctctgagcttcatctatgaaagtggagattgatcttctgaagtcacgggtaataggaagatgccctgacagtgttaggaatcttttggtctctaactacatttttttttttttttagactgagtctcgctctgtcacccaggctggagttcagtggtgcagtctcagctcactgcaacctctgcctctgggttcaagcaattctcctgcctcagcctcccaagtaactgggattacaggcatccaccatcacgcccggctaagttttcgtatttttagtacagacggggtttcaccatgttggccatgggccaggctggtctcgaactcctgacctcaggtgatctgcctgccttggcctccaaaagtgctgggattacagacatgagccaccacactcagccggtctctaacttcttatgaggacgcctgggattcttattctctgctctgcactgcttgagaggcagagtatagcaggtttaatttgctcacattctcagtcctggcatcaggattggaacccaggagtctgtctctggaggctgtgctttcaggagtgtgagtttcagcgactcacctttcattacacacatcttcatgaacagctcctctgtgacaggtgcttctgagggcatgaggacacagcagggaactaaatgggcagagatacctgccctggaggagcagaaggtactaagggaggcagccgcgcaatcagccacaaacaggataactcaacaagtgagttacatcagagctaagtgctagaaacagaaaagaggacctaaagggagaattgagaaatcaggggagagttgccattgttaatgggatggtcagaaaagtccttgttgatgtttaatcacggtcagctcagaatttctccttcctcgactgccccaattttctgatctcagctctaggctagagatggatcagcgtggcttctccagccaggcaaagaccccgaattcacaattgaaaaagaatgagggaatgagtcaagacggaggagagcattccaatttctccttccttgactgccccaattttctgatctcagctctaggctagagatggatcagcgtggcttctccagccaggcaaagaccccaaattcacaattgaaaaagaatgagggaatgagtcaagacggaggagagcattccaggtagaggcaacaccctgtggctgcaccatgcctggtacaggagcagcaaggaggaatagtgagggagagacagtgagggagagggagcaggtaagcacagggaggggacagagggatgttgtgtaggccttgtagatcaaggggaggacttggcatttactcctaatgaggtgggactatggaggggtctaagcagaagagggacatccccaggctcaggtgttcccagacgccctctggtggctatgggaaaactgtgcgtgaggcattggacacagcaggttaagaggtgactaggctggtccaggccgatgataatgggatcagtgtggaccacgtgggccattggaagtgggcttgccatggtgggcacatggaggtggtgaggacttgcccatctggatgggttgtgaaggtgaagcccaatgaattttttgatgggttagaagtgagtttagagacaggccgggcatggtgactcatgcctgtaatcccagcactttgggaggccaaggcaggcagatcacttgagatcaggtgttcaagaccagcctggccaacatggtgaaaccctgtctctactaaaaatacaaaaattagctgggtgtggtggcacatgcctgtaatcccagctacttgggaggctaaggcaggagaatcgcttcaacccgggaggcggaggttgcggtgagctgagattatggcactacactccaacctgggcaagagagtgagactccatctcaaaaaaattaaataaataaacaaataagtcaggtgcagtggtgtgctcctgtggtccccgctactttggaggctgaggtggaagaactgcttgagcctaggaggttgaggctgcagtgagctgtgatcatgccactacactccagcctgggcaacacagcgagatcttgtctcaaaagaaaaaaaaaaaaccttaaccatttccattcattcatgtattcattgaacaaatatttaaatatttttaattaaaaattttttttggctgggcatagtgactcacgcctgtaatcccagcactttgggaagccaaggtgggtggatcacctgaggtcaggagttcaagaccagcctgtccatcatagtggaacctcgtctctaccaaaaatacaaaaattagccgggtgtggtggcacacacctgtaatcccagctacttgggaggctgaagcaggagaatcacttgaacccaggaggcggagtttgtagtgagctgagatcgcaccattgcactccagcctgggcaacaagcgtgagactctgtctcaaaaaaaaaaaaaatttattgttttaaaaacagaaataggctcaaagaaagagctggtggaggagctggcagagtcacactgggggataggggcagggccagcccagctggagttcagcgaggactctgtccatctcaggattgctgggg

SEQ ID NO: 38 - DNA, 200002 bp, Homo sapiens
gtcataattacatctttttatattatgtatctattaacaaattattttagctgtattagggttcttcagaggatcaaaactaatagaatatatataaatatatgaggatatttattatgaaaattgactcacatgattatgaaagccgaaaagctccatccatgccatctgcaagatggagaaccagaaaagtcactggtgtaatttaatatgagtccaagggcctgagaaccatggagggttggggaagggagtgttggtgtaaatcctggagtccaaaggcccaaaaaccaagagctccagtattgaagagcaggagaagatggctctcccagctccagaagagagaggaaatttacctttcctgcaccattttcttccctcctgggctccattggattggatgaggtctgacagattgataagggcagatcttccttatttagtctactaattcaaatgctaatctcttttagaaacaccttcacagacacatctagaaatatgctttgcccactattttggtaaatccttaaccagccaaattgacacctgtaattaactatcacagtagttatagttgtttttaatacttttgtcttttaacttttacactaaagttaaaagtgatttatataccactattacaatattaaagtattctgaatttgagtagatacttacctttaacagtgagttttatactttctcaagttttcatgtttcttattagtgccttttcatttcaagttgaagacctccctttagcataccttataaggcagatctagtgttgaggaaattcttaggcttttgtatatctcagaaagtctttatttctttttcatttctgagagccagcttcactggggatattattcttagttggcaagtgtttgtttgtctgtttcagcactttgaatacatcattccactctactggcctgaaagggttttgctgagaaatttcctgatagtctcttgaaacttccctagtttgtgacaagtcatttttcttcataatgggggagtacatactcatgattaacaaacatgtctctcaagtctcatgtagccaaaaggtacaaactttgtgtctgcagcaggaaaacaacatggctgcaactgctggtccagttactccatggcttaattaaactgtgtcaataatgattatattactgcttaatatagaacattcggtggactaaaaaattacatgtttgtttgtttgagcccctagcagatgtcttgctgccaaaaactataagtaaaagcatcttgttttctggtgctaagctgctatctgtctctccacacctgctaatctgttcctccttctctatcctgacataagtcactttaaggagaaagacaattcagggtaggaacaatgtctatatctttccccaagagagactgaagctgtatacactcattcagatacattgaggaacttcaagaaaaagaggaactcaaacttttgtcgctctcttggatacaggtgtccaagttaccattttactcagtccagtggaggtgaaagggaaatacttgaatacagctaatgaggctttggaagagattacagatggaaaggaaaaataatgtgactttctaggtggagccctttgtgtcagtttaatgtacaattgacccttggcatctttgggggactggttccagaatccctgcagataccaaaatttatggatactcaagtacttgttataaaatgatatagtatttgcatttaattcacacacatgctgtcatctactttaaatcatttctagattactaataatagctgatacaatgcaagtgctatgtaaatagttattatgtgttttctagggacgaattataaggaaaaatgtctgtatatgttcaacacatatgcaatcatctttgtttcccttaatgttttcagtctgtgattagttgaatccacagatggtgaacccacagatacagagggcaaactatacttttgctgttgtgttatatgactatgttaccccgttccataaattacaaaagggattccactgattgtgaagatctgtattcatagaagtgctagtacttttggggtctctgtgagttacaagtcactgtgactgatgattttgttattggagcacttagcataggtagacgcctccattcactgaatgccacttggagtcttgttaatagtattctaacctgaatgatatatgagatatattaaatagatttggttgcagcctctattggtcagactaatcggagtggtcagtggaatgtcattctcatgggaaaattcaccaggagcagtgcagtgtagagataagagttgggtattgtttcagggaaaataatccccatgggtctcttgcatttctgcatgtcttcagtgcagtcactggctccctttgttctaaattaacttttcaagcatgtttttagagaaacagtcttggaaaatagatacagtgtttctctcagggtcaaatgtcaaacatgcttactcttcatgatgtctatgatccagggttcctaaactcaacattcctctcctgtgaaacaacctgctgcatatgcaggtgtcagctggccctatgggaattggagctcagggatctggtgtcaatgctaacactctggcttcggctattgccataaatgataaaggcctttgtctctaacctaggcttcttatgtcttctgcctgcattcccgaaactatgacgggttaacttgttagcatacaaataggataaaatttctgacttttcacagttctcaatgccccttccacaggtttcggttttctagttgaaattgtggcactgcaacgtcatcataatcaccaactctattgctttgacaatcttttaataagacacagacattttagtcaaagtataatatagtcataataatattgaaataattatgggcaatttatgcagtaataactagtagagattaatcgaagctattagaagataaagaaagcaacttgataccatattgaaaatacatcttaaaggcttataaggcattaaaagaaaaagctgacaaagaaaagggacacatgtgaaccacagtttagttaataaacagtctgctcatggaataggagagcaataaataggtctgtcacatattttttacagcaatccagccatataacatagccctccatgagactgcccattttccccaactatgctagatagaaatgtttggatagtttacttgggaattgacaattatgagggagtactcaaaatacccccgtgagctatataagcaacagcttttgcccctgacttccatattgtatataatatatataggtatacaatatgtatacaatatgtatagatatggcaatatgtatacaatatgatgcatttgtatacaataagcataagtatacaatatgtatacatacacagtatgcaagtcaggggcaaaagctgtttattatatagctcatcatttgttaacaagtgaaggtgctgcacgacggggcagcagctgctaaatcccaatcatgaatgagatgcaagagccagcccaggggttaatagctctaagaccagtgaatcctgggacagccactgctgtccatgtagtccaaaacattgatcacagattgcttggtggaaggaagtaaagacttaggacgaaaaagattgtatggcaggttctggacacatcacaagcagaggagtacagggagtggtttcacaagatctgggtccgcggcatgctgttggcagctggggatcccctcaggtttcttggcagtagttcaggagctggattctgccatagctgttcctggcttagcagaggacatctctgagggtcacatgaaaaaaggggctattagaggggatgacagccccatggcaataacccctgagggaatgacagctgtggttttcacctgagcaattattgaaagacaagatgaccttagtttagattataggtaaagtactcgcacttacttaatgctatttctccttctttgctgtggcttctagaattttttagtaatgactactagcattcagtgtaggttttattctgactcactatttcaaatgtggttatgaacatagctcaattattcagatgtcaggaaaatggctacttattactatgaaaaaagtactcagtgaatctctaaagcaagagaactgtggtcttgtttactttttaacaaaccatgcatctagaaaaacaatatttcaagttttattaaaatatatttaaaattctgtggctagatgaatatttattacacctggaatattaatttaaaataggttacatttatgacctaataaagacttgtatatgtgttaagtgtggcctttaaggtacataaagggctcactaaaattattgtgcttcatatgtttaaatattcttaataaacttctcatgagagatacttcaatgtacaatcagtaggacactaggttgagcatcacaaggcttgagttctagccctgatcggctggtaatgagccacgtgaaattgaataactcatttaacctcagcagatgtatttgctcaactgcagaataagtaaggttcactaaagatctcttacacatttagacatgattgtgattctatgaaaacataactgtgatagaaatgaggcagcttcagaagaaaccatgcaaaaatggtcactggtctttgccataaatacaaaggccacagcatttcactcagatatctgatggaagcttgggaaacatttaactctgattaggcatctttcagagcaaaacacagcttgggctgatatttgtcctctaaggaaaactcaaaggctcaaagtgtagaatattgttttttttaattgcctaacatttcatttgtagccttagggccatggagcactgaccttgcattagaagcccctccaggaccttctcaagatcaatggtttgatctccaccatcattcactgctggaaattaaaccagactcctgaggaccaagccaccatcagctgtagcctcagggagatgggaatgtgggagcaggcccactttaagcaagctgctgaataaatatagacttgaaaaatggaagaaacacatgaagcctgtttctgttttctaagaaagatgtgtttctttcagtggtaatgtatattctaactttaatctggtaagtacacctgtaatcactacaaaccttgtgaatatcaacagctaaaatttaaaatttatttattgtacttgctcctgcagtttaatttaataaaatatgaggtctagaggaaggtactttgttcctaagaatctcaacatgcattattagattggtttcctaacatatagagtgtgaaagtgaattcgctcatgccaagtgggagataagaacaatggctaataactctactctaaattttgacacagtttattgtgaaagagggctttttaatccaggtgtttcactctgcacagtcaatttaaataaggagcatgcaactgtccataaagtaatagtgacaaggcactgcaataataagggtgatgctattcttagctttctctttgatttttagccttcttttctcattatctttgtcaattagtagttactaaactccttcagggccaacgacccagtaccattgagtaatggaagaatagaaattggcttaactattttctgaaatttaccctcaacatttctatgttcttaagtttggatacaactacattagttttgcctctgagatccaagggacaactctctttgaatgccatcagtgactttgtttccgtaaagctagaggaagttatacaaaaagtcaggcaaataacttattcttatgcaactacaaaaagatttgtattttattttaaaattgagctttagatgtttagtgtatttgtacctatctacctatgatgcattttatacttcatcaaggccgtatctctgatataaccagaatatgatttattaattatattagctgtttccttcttaaatatttttcaatcaactattatttgagtccaagtggaagattttagaacaactctctaggtaaaagaatttcaaatgaggaagtaagtaagactcctggaaataaaacagaaagcacaactagggaaggatattgtggcttcaatagagatatgagtgattctcatctaacatggagcaaagtcctgtccaatcctattagtgtctacaatgagctcaaaattttcaagagaaatagtatttaatttaaaaagaataaggactaaaggatatggaaaatgaaagtactaccattaagacgataattgttgtattgtaggtgaatctgactccatgccatctaaatccttttcctagcatctagattctattgatgacacatgacttgaagttagtatttgtttttttctaagatatttcaattgcataatattttacaaactctaatgaaaatatgttcatttcctttattgcatttatttttgagttacaaatgagccatccagtcaacaatactcagttctctgggtgtttcttctgcagtctcacagcaatacaatataaccagaccaatcatttttagtcaaattatttgtatcggtcctccacattgcacagatatttcttccacatttgaagctactctaatgactagaagtataatataagtaaagcacaattaaagtattacagtgttatactcaaactttaaagattcatgggttaaaaccctcgttccaccatttacttcctgtactggaaaagttacttaaattacagagtagggagtaagtaagactcttgaaagtagaaagacagagtagaactagggaaggatatcgtggcttaaagaaagatatgagtaattctcttctaacacaaagcaaagtcttgtcctccacaggacaaatttgtgcctttgtcctcactggaaaaagggggatttactaatgttacttataccactgggttatttgagtttaaaatgataaaatatgtacaaagtgttaggtaaataataagcacccaattaataagagctattttatggctcttgacccagcactgtacaggcaagaagacattcttgatagtcattatgctttacttctaagagaaaaacatgtggttaaactaccaatgtcttgaggtgttcaggataccaatgtacaaatcctaccattctttttaggcaggaagaagtcccttggtctatgaagaatgctctgtagcatgcatatacccaccggtatgttttgacattgcttaaaaatgagtcctgcatagaatatcctggttatgtcccatactgcttacattcttttcacatggaatgaaataattttcttggtctctgccctggattcaaatgcattatagacaatcataaaaacaaactgaaattgaggcccaagagaaaaatatcagacgaagtatcaaatgatacctagcatatattgtgctcttattatgtgccaaacagtccactaagcatttaattggaatcatgccatttagttgtcataatcatccaatgactttaatattattatctccattttacaataatggaaccaagtctcagaaatgttaatttgggccaggtgcagtggctcacgcctgtaatcccagcatttttgaaggctgaggcaggtggatcacttgatgtcaggagtttgagaccagcctgcccagcatgatgaaaccccatctctacaagaagtacaaatattagccaggtgttgtggcatgcacctgtaattccagctacttgggaggctgaggcatgagaatcgcttgaacccgggagacagagtttgcagggagctaacattgcactactgccctccagcctgggcagcaaagtgagacactgacaaaaaaaaaaaaaaaaaagaaaaagaaaaaaagaatgttaattcatcccagagcacatagcttttaatacacagaatttggaattgagtaagatctagtcatactataagattcatgtccttttccttacactaaattttctaccaaggtttatataattatggcattccatattccaatatcaaaagtctttttgtacctgagtccacataatttctttctatgaggagctctaatatgctccatgttgagttagattaaatactggctccttcttcagctagcttctctttctagcagtggtcaagctcagcctggaaagctaatgtctagaatgatgaacagagtagatgggaaagtgaaacttaacatcacgtccctctttcctggcattcccctgctccacaacacataccacacatagcccgttttcgccaaagtcctgttttctcagcaagctacacccagtaaaataatatatacttggaaggcacatggaatgggtaggttttccctcttgtctttagaaacagtggtccaaatgaattgagctttttctgggcaacccagttggcattgcaatagtaaaaatccttattgtgaatgaacttgatctatgttcacatgattggctgtgactagaatgctgagaagctgccacgagataaattctgtctttactgttgccaatgctgtgttactgccatcagtgctgtggacagaagctttatgtcaatgttgtttgcttcagggatgttctgctattgaggctgccaaaggctctgagtactattgatggtattgaatagtgtttggcctctctcagacttccgtcaatcctatccctctacagagcacctgtgtatgtggtggtttacagattttaggcttaagtcttcctctttgagatggcctgtgtctatcccactgtattattcagggctacatagagaaacagaaccaataaaatagatagatagatgatagatgatagatgatagatagatagatagatagatagatagatagatagatagacagactatatataatatatatttatctcactgtatatatgtgtgtgtatatatatgcatgtgtgtgtgtgtgtgtgtgtgtgtgtgtgtgtgtgtgtatgaagagagagagagagtgagtgatttatcacgaaggattggctcacacaattatggaggctaagaaatctcatgatgtgtcacctgcaacctggaaactcaaggaaaccagtgatataattccagtccaaatgtgaagatctgagaaccaggggagccaatggtataaatccagtccaagggcaggagaaacccaatgtctctgctcaagtaggcttgcaggaaacataaacgggcacatttctccttccccgaccatttgttttatttaggccctcaatggactgaacgattcccatccacattggagagggccatctactgagcacactgatttaaatgcttatctcccttgaacactctcacagacacactcagaaataatgcttaatctgggcagcccttggctcaatcatgttgatacatagaattaccatggcacccaccctcagaactaactggtaaattatcagtagcattaggtttgccatagattcagagatacttgccaatttacttcaactagacagcgtttaagtttcttaattttctcccttagtagatgatgctgcctgcatcttccaaaatacaaaacagctaatctctcttttgttggatgactagctttcctaatctctcatggatttctgggtttatttacaaatccccactacctcccccataccaagtctctgagctagctgagttgctaaatatgctatatacatggtaattttttaagccttacactttcaatttattaacttattaaggctcacagtagccctattattatccttcacttttgaagttgaagaaactgaggtggttaaataacttgcacacagtcacacagttggaacttaaacagccatcactaagcaaagctaagattccagctcaaggaaatccatattcagagttcatgctctcaaccactaccttattttgccctgaaaaaatgtgagatccaaggccaggcatggtggctcacgcctgtaatcccagcactttgggaggccgaggcaggcggatcacgaggtcaggagattgagaccatcctggctaatgtggtgaaacccgtttctactacaaatacaaaaaattagccgggcatggtggcaggcacctgtagtcccagctactcgggagtctgaggcaggagaatggcgtgaacccaggaagcagagcttgcagtgagccgagattgcgccactgcactccagcctgggtgacatagcgagactccatctcaaaaaaaaaaaaaaaaattgaaagatcaatttaagaacacaccaaaagtttcagaatagctaagctacctaaataaaattaatcaatttcaaacatctgactctatggtcttatgatgttcatatgagtatattttccatcttctgttgactaccaccatgagttattcttttctggttcacactataaaaattataacaagaggatatgttctcttttcttctaaatatttatactattttcattaggtaacaaacgaagaaacaaaaagcctgtaacataacacctgcaaaaggattgaataaaaataatagtgtgacaagtccaaattttgcttccaaagaaagcaaatttatttaatacaaagaatattttccaaactcaaaaaatacttaagaaataatgaaaacaggaaaaaaacaaacaaccaaaaaaacaacgggaacgaaatgaagtgaagattctaaacttcaattcattctatttaaaggcttctggttgctacgtggttataaagcccatggaggtgaaattcaaaattaccttgctctattcgaacaatagacttaatcttctagttaatttgagaatgttgtgattcaatggctaaaataacagatggccagtgagtaggcctggattttagttgtggttctgatgttattaactacttgggcaacctctgatagagttgaacctatcgtaattcacaggactaggtaggcttttaggtttggttccaatattttatgaatttctgagactagtagcacattacttaataaaccagatccaatgctaagtatttccaaagaaaacaacttgcagttaaagtgtgatgtttcctttaagtattcatgttatttcctggctacagctcttattgcttaataacaaatcgtatcctactgctctaaaatagctagcatgctttccaaccccagattaccactagacatacccaaaagaaaaacaagaaaaaaaatcttgtctttggagacagtagtaaaataagacatgttcatttactaacaaacacacacaacattttttatttaaagaaatacaaaatatctaagtatctcaaaaataaattcatccaaatgagaatataagccatctcccctacagatcttcacttactaggcaattgagaaccaccagtaacacagcaagttggttcaactcctggagaagattccaggagttgtggctcaggtgcaacattgaccagaggtctacaggaactggattcagggttctgagactgacactgacattggctagatgcacgttccagagtttcgaaatttttagacttagaagtcttgggtgggcaactgtttcccttgaggcttgcaggttggcagctctgggctacaaaacccatctgctgagtgctttctgattggcaaggctgagaaacacaagccagccctgctgaagaactttctgattggcacgctgtcctttcgcagggcctggaattggagtaagtagtttggacaactccggggaagcagttactttgcacacagctatcgtctgtgaataagtcctgttcacaattggtcatttggcagctggtggtttcattgcaggtttcttgaaagttgtccaggaaacaggttctgctatggaagctgctgggcaaacacaatctgtcttcaaaggttataggattagtgccatgtgtgatggcagagagtggtggggcattgtggaagctcctgagtgaatggcagtggctatgaggcatattgctaaaaatccttaaagatggtcataaggactcaacatgctgagtttgaaaattaaattctttggtgcggcgattatatactcagaaacctgggtgttggcttctcaagacttctttgcaactcattgcttaaactaatttgaaggataacatctcattaccactttggttatatatgcagatgatgtcttattaacaaagatgtaagtccattttgaatcttcaaaatggcttttatgttagctccaaagatgactcattcaaggtggggttggtcaaataagagtctaaacctgtccaaccaagctaacatttttttttttttttgccaccatgactctgcacattggtaagtggacaatgagaaatgcatgaggcagtggccaactgaatactgattaacatttagcactggttttgagagctgccaatgtagcagaatgtggtaatttgatgttcaagacatttaaagttagaattggatccaggttgagcccaatctcattccactcagatattgttctctccagtggaccagaatgtgagaggactttgtgatcacattccttctcagtgttcatgcaaagtactgagtgtggccattgcccaataaatacttgtcttttgcctaacatttcgtttccctaatctccttgaaagccaagtttaaatgcgtccttttcctgaagtcttccccaatcttcccatttaggagttatttcttccttttctgaattactaatggatttaattccttttttctatacttgacaaagtggtgtgtttacttgtgtttgtgcttctcaaaggttgattattttcctttataatgaaccttcttcagatatttttcatctttattctgtgctttttttattgactgcagacagatgatcagttcctatgtttatcgcattaggacaccgttcttagcatagtttcatactcatggcacagagccaaccagcacaatttctataacatattctataatatatttggctcagctaatgacaataaaatagaagtatagtcttagtgcactaactagactccctttctaaggtctgaagaagcccaagaacattcagcaattctcagtaattcttatgcaaacacttccttgaaagactgaggatattataaatttaaaagggcacatctgaatactttcagctttataggctgcacactcatcttgtatacaatacctttgtaacacacgcaagtcatttataattttgaataaccacacttgtatgtttaaagatctcagtgtgccctccacatgaaccctacagccacccatttaattcttacgcatatatgtatttattattgcacggaggcttcgttattgcacagaggcttcattatagcttgtgactttcttgcttaaagataccaaatggcttctcattgtccttacaataagatctttttcctttagacttccctacaacatcttataagacctggccatggcctttctttctttctttctttctttttctttttcttttctttttttttttttttttttttttgacagaatttcactcttgtcgcccaggctggagtgcaatggcatggtctcaggtcactgcaacctccgcctcccgagttcaagcaattctcctgcctcagcctcctgattagctgggattacatgcgcccaccaccacgtccagctaatttttgtatttttaatagagatgggggtttcatcatgttggccaggctggtctcgaactcctgacttcaggtgatcttcctgtcttggcctcccaaagtgctgggattagaggcgtgagcaaccatgcccggccctatttttctaaatctaactcttgtcatgtcactctgcccaacatgattcatcctcacaggcctcatgcagctccttggcacactaaacctctccttgcctccaaactttgcatacgcagctgcctgtctgtttcacccctccactgccttctcccattctatccatagttctcatcttttgtgtcttagcttaagagttacttcttagaatgtctctctatcatcctatatgagaaaattccattatcagggtctcatattttttcatttttaaaactcatcttaacttatgatgattttatttatttctcttttgtgcttttgccactaattgtgaattccatgaagaggagaagcatgtgtatcttcctcacttccataaccccaacactgagcatggtgtctcattgccatatcatcagattcccataaatgtatcttcaaaaattcatacatagaaggtgctaagtaaaaatttaattataactaaacatctgaagaaatatagttttgaaattttgacatttccaagatttctaagaattggcaagagtattgagctcaaagaaaaacaaatttaaaaactatgcctatctttcagctacccctttgtttaataagaacaaaatcattaagaaagctacttattaccatggcacaaacttattcaattatttcaaaatcatgtttatttgtaggttttttttttctttttttttttagacggagtcttgctttgtcactcaggctggagtacagtggtgtgatcttggctcactgcaacctctgtctcctaggttcaagccattctcctgcctcagcctcccaagtagctaggattacaggtgtgtaccaccacacctggctaatttttgtatttttagtagagacgggatttcaccatgttggccaggctcatctcgaactcctgacctcaggtgatcccccccgccatggactccaaaagtgctgggattacaggcgtgagccactgtgcctggccatgtaggtatgtttttaccatgaaaatgggagccagttctcaataccaacacagagtcctcttgccaaattgtataggtataggcaggacatcatataggctggaatttacagaactgtctccagccagcagccttcttattaatttcacaatgtgcagccaattactgagtacttgggcagtcccttcaaatttcatatggtgatgttaagtctgtcatttgtgaataaggtcactccatgagttattttctctttggaatgaggcatttgcacattttatttaagtgagagccaaattaataagtgtttcagtatataattttgattcagtgagtaaacacagattttggttgttgctggatttatagaggaagttacctggtttattactatggaatgacgtaggctaggacaactggtcaccttggaattgtttacatgcagcctactaaaaactaagtattagctttgtaagcatttgaaaaattatgactatgtagtttatctgctggtattcttgagaaatagatagaactggttacctaattgcatacagtaactggatactcttgctactaaaggggtgaacaattccctggtctctcctggacttgaaatcattctcctggaatgactgcagctgcagtggcacctcctaaccaccagagggtggaatatcaacatttggtatgaggatgcaattaaatataagaattctagagtgagaatgccaggattctaagccaatatttacaatctcaaactgtaactttgaacaggttccataagttttctatgtcatggctgtttcattaaaataaatgagatattgtatatggtaccagattgcctgccacatattgaatgataaataataacaattattactgatcaggttaggaatcttcatgcagactaagacgcttctcattataacatcaatctaggattgatataaaattataagcaaaaacaagcacagtttttttatgtttatgattatgttgttgatttataattatgtgttaattttcacattccattcctttaaaggttggattatacttattcccattaatgatggaacttgtctccatctctcaagagctcagcatttggtagttgtaacattgaataatttatatgtcttttatatttgatcatatggctatactaaacttcttaatcacttgtttagaaacattgaagtgaaatgaaataaaataaccatttttttttttttttagaggcagggtcttactctgtagcccaggttggagtgcagtggcgtgatcacaatttgcaacctcaaactcctggattcaagcaatcctcctaccttggttttctgaatagctaggactacaggctcacaccacaacacttgactattttaaattattttgtagagacaggggtttcactgtgctgcccaggctggttttgaacccctggcctcaagtgatcctcctgcctcgccctctcaaattgctgggattacaggcatgagccaccatgcttgggcctagtcactctcttcatcccagtggtcccacaatttatttacctcatccttgtcttagttttatctcatcaaccaaacttataccaaatgacataagttaattttaatccattcctcttctccattcaccaaatgccgtaagttaattttaatccattcctcatctccattcaagaagtttcatacagaaccattgcataacaatggaggaatactagaaaaagcatgaagagatgtggctttcagccttggatccatcaactcactgcataaatttggacaagtcactctacctctctggatatctttcaagataatgagtttagatgagaagctctctaaggtcctgtcacatcctataattttcggtcagaatcttaataacgtagaattaacattacatgacatctcgtcaaatctgtctattgaatgaaatcttcacttacatttaagaccatctgatctttattaagattacatataaaattttaacaggacagaccaaagactgaagtcagtacattattagttcccacagatgctagtcaatatccacaactgtaaaattagtaatcttatggtatttaatcttatagtattaatcttatattaattcttcttatagtattaatcttatagtatttgacagcaactcttgagaataaataaaagtatatctctgcagtcaagtacacgttagtctatcccaaaagaggcttttttgagggaaatgaataacttttgttaaacataacattctatgaaataagtcaagtaccatataacccttctcagacactgtaatgcatatagaaaaaaaaatttaagttgtagaatacttcaaaattcttatgtggaacacagaaatagtattttgccagctttctctgtttctaatgagaaatagatattttattatatgataaaataaatcacatgtgacatcatttgttctctgagactatctctaaataattttgcttctttggctagttcttggtcatttacaattcaattatacgacacattaattcaaatagccaaacaaaaaacaaaagaagtaaaacataaaagttggaggattacacagtgtctatgcggctcttaataataagtaattggagaaaagaatgaaccatggtgttttgaccatctgagcattatagtccacattttccgactctttgttccattatatcttggatatgaaagcattatagtttactgtagtaattatacacttgttttttgcttcttttcccagatgtagttgttcttgccttcctctgaggttatctttgagtgaagttatttttctatttctgggtgatccagaaatgtgaattggtttttgatttgtctcacttctgtaggcgctggagttgtgacagtgtgtcattgagatattgagattgtgctaaatcaattgtgatgatgatgatcagaggattgtgacaactagcttatctaaaaagagttccactagcaaaaatgaatgcgagtttgatgtgtcattgacatatcctgggactgtcacctggctcaattccacttatttatttaatatttatttatcttttattgagtacaggcataccacattttattgtgcttttctttgttgcactgtgcagatattgcatgttttacaaattaaagatttgtggcaacactgagtcaagcaaggctatcggcatcatttttccaatagtgtgtgctcatttcatgtctctgccacattttgataactcttgcggtatttcagattttttcattattattttatctgttatggtgatctgtgatcagtgatgtttaatgttattattgttaattgtttcggggcaccacgaaccacatccacataatgaaatgggaaaagttcttttattctcccttgcaaggcatgcaatggggttgtggctcgcttctttggtgagcccctgctcagacctctgggggaacaggcagatgggcaggctgtgggtctcccaccctacagcagtgtctagggttgaatgtttacacctgtagccccagtgggcatgagttacagggtgttctttcagtttagccgtccataggcagcttgtgttagctcaattacaccctctgccttatcacaaagacagggggctttctgtatcccagagtttcttgccttggtataccagaagaatcagggcacacatgggcttggagaatgagttgagtgcaagttttattgggtggaagtagctctcagcatatgggggagccagaagggagatggagtgggaaggtggttttaccctggagttgggcccgttcagtggctgggctctcctctaactgccccggccaaacttcgcatcattccgctggttgacggtctgcaggtctgccagtgtctgtcagtgtgctcttacacaagtgcattcctcttgacgtccagccacttgtgtcttctgccagtctgttcctcttgacgtccagctgcttgtgtgcatgcccactagggtctcgggtttttcataggtacaggatgggggcgtggcaggacaagtggtcttgggtaatgcaacatttcggcacaaaataagaaatggctgtcctcacctaggtccgtgggcacaggcccagggggtggagccatagccagggacccacctttctctacccagaacttccctgccccctcccatatcaataagacaacaaacttaataaatcaaatgttgtgtgtgttacaaccgttccatcgaatggtacacccctgtctctctccctttcttcaggcttccctcttccctgagacacaacaatattgcaattagtccaatcaataaccctaaaatggcctctgtgtgttcaagtgagaggaagagtcacatacccttattttaaatcaaaagctaaaaatgattaagcttagtgaggaagccaatgttgaaagctgagatagactgaaagctaggcctcttgcaccaaatagctaacttgtgaatgcaaaggaaaagtccttaaaggaaattaaaagtgctaacctatactaacgaaaaaaatgatactctatatgaacacacaaatgataagaaagcaaaacaagctccttgctgatatggagaaagttttagcagcctggatagaagatcaaaccagccacaacattcccttaagccaaaacctaatccagggggaggcgctaactctcttcaattgtatgaatactgagagaggtaaggaagctttagaagaaaagtcagaagctagcagaggctgattcatgaggtttaaggaaggaagccatctctataacataaaagtgcaaggtaaagcagtaagtgctgatggagaaactgctgcaagttatccagaagatctagccaagatcattgaagaaggtggctacacaaaacagcagaatttcaatgtagataaaagagcattctgttggaagataacatcatctaggactttcatagttagagagaagtcaatgcctggctccaaagtttcaaaggacaggctgactcttttttatgggctaatgcagctggtgacaagttgaagccaatgctcatttaccattctgaaaatcacaaggcccttaagtattattgtaaatctattccacttgtgctctgtaaaaggaacaacaaagcctggatgacagcacatctgtttacagcatggtttactgaatatttgaagcccatggttgagacctactactaaagaaagattcctttcaaaatattagtgctcgttgactatgcacctagtcacccaagagctttgaaaggggctggagggaaggcagaaatgggctgcaaatgggctttgcaattatattaaggggtcttcattgggaaggaggattgttgaaggttttaaatgagtgtctcatttaaaaacatgttatctacgagtaacagaaattgtaattcaaaatggcttaagcgataagaaattttattggcttacataaaccagtgtccagaagtgagatggtccaggttctgtcctcctgcatttctcttggttctggcctctttcatttgatggtttaattttcaggttagatcgggtatggtggctcacacctgtaatcccagcactttgggaggctgaggcaggcagaacacttgaggtcaggagttcgtcaacagcctggccaacatggcaaaaccccatctctacaaaaaatacaaaaactagctgggcgtggtggcatgcacctgtaatcccagctactcaggaggctgaggcaggagagaatcgttggaggcaggagagaatcacttggaaccaggaggaagaggttatagtgagctgagattgtgccactgcactccagcctgggcaacagagggagaccctgtctcaagaaaaaaaaaaaaaattcaggccatatgcaaaacggatgcagcattccacatataacaaagtccagaggtagagagaatcgttttaagaaatcccagagacactttgggaggccgaggtgggcagattgcgaggtcaggagatcgagaccatcctggctaacacggtgaaaccccgtctctactaaaaatacaaaaaatgagccaggcatggtggcaggcgcctgtagtcccagctactcgtgaggctgaggcaggagaatggcgtgaacccagaaggcggggcttgcagtgagccgagattgcgccactgcactctagtctgggtgacagagcaagactccatctcagaaaaaaaaaaaaaaaaagaaagaaaccccagagaaggaactttaccagaagcattgttccacatggctccttgtttctcattggcttacctcagatcacatgctcattcctgagccaatcactttcagtaggcattggggcgctctagagtagccaaattcaatccttaagcctaaggcataatcacgttcatttgcaggactatgtgtggacgaggagggatgcacaaacaaaatccaatttccatagaaagaagagcgagaaggaaaacagctgtgagagcagtgaacgatgagctacccacctccatttagatatttgaaaatgtatatgactgtgttccacttaatgtaagaatataatggactgtctagttttgcatccagatacaagcccaggatatcaagaggtaaagtcttatctctcagtccgtgtcacctatgcatgatactgccaggtttcagacagttttcaggtgacttctattataacaccggatggctttatagtgacctaatgaaaggaggagggagtgaaccatcaaattaaaaaaaaaaaaactcttagatattatattcttcttattatagtggaatgcatacatctttaatttcatgtatacctaaactatttgtttcattacacttgctactgaactcagttaaaatcctgacctcagaatttcattgtggcttatatatgtctgggaaggaagattacaggaaggattttgataatgttctcataaaaacagccaggctagtacttgctaaaacatcactgctgtctctggatattttcttcctagactagacccatgagtagcttaaccaaagtgaagtgtcctgattaggcctaaatggccatgaatagaaaaacagagataatctcctgtcctatctctgagtctacttggcagaaattcccaggaactagatctctgttgttagaaaactctgcctatcaaggaacctactcctttccctcaaagtgaatattttatttttagacaaaaagtgggggtttcaaattcccgacagacatcttataaagaaaattaacacaagatttgtgatctgatatcagattaaatgagtttatttgaagaaaaagaaatcaactcttgctccatttttaactagagaaggaagggaaaatacaagaaaacagaagaaaaagagatgagtattctatgagaaatgttattttaatattaataagtttaaaacaattatcttttctggatagtagaatataggttctagccagatgatagctgagatggactttgagagaaataattgtaatgtggaggtttggagcccttagcaagttgatcggtagaagccagatccacaagttggtctgtaacaggaagactggaatgtcctaaagagaacatatgttgggtggcagaatccagatccatagcccagggaagggaagccacagcctccataacccagggatctgacgccactggacccacggcccactgagtagcagctcctagatccatagcccagggagcggcagctgctggatccaaagcctagagactcagagtaagtcgactggcagggactgcagagcacggagcttctggggcggtagcaggaggtctggcaggggctggactccacacaggacatctggcagctaggggtttcccagcaagtctcctgaaagcccttgcagagagaggaacccagctggcaggtgctgggagatcaaaggttcagtgctgtagaccaggttgctggggtacgaggagccaccacgggagtagcctgagtagcacaggtagccctcacaggaatgggaggagaagtttccacagcagcagttgtaggacatgttgacaggagatgtgagttcagctgagctgcattgagaagatgccctgatgtccctgcctgtgcccaatgatccagtgatgtttacaccctcacactgctgggcgtgatgcagtatccgggaacccccccattcttgtgaatgtgttttcatcaaatgactaagtaacctaggttataattataactcaacacattcatttgtctttaacagcagtgtaatcattccagtttatagaagcccattggcttctctctctctctctctctgtctctttctctctctctctctctctctctctctctgcagaaataaggtttggtttgctttcagaaacattggtgatgatacatacagtgcctccccaccccttttactgagcttgactgtgggtattctgagcttcagcctacaaattcttaccagcaatgtactcccaacagtaatcagcagccacccaccccccattatttacatatgttttattaagcattaactacatgcgcaacatttaaaagtgtggtatgatttaatctttgcaaatatcttatgagatacaagttgtcataaacaatttagaagtaaggccatggaggtttggaaaagttatgtaacattcaggtaataaatcaaacaaatcatggaccccatgtcatcccaggtgtgtctgtctttaaggctagcacaaaccacagagctatatagacaatttgtgaagcttgtaatttctgctcccagaatcacatggacaattgagtatgcaggtgaaaaaaaaattccaaggtgttaatatttgcatttcatctgatatatctacttgagtattcttaccccttttatgaattccccaaatatagccaactgaggggacagcttcttaattgattttggttatttttttagtattcagagttactatggagatgctttgttacaaattatcttctatttgccctctcactcagtttatcctagttaagcaactcatgttttatccaccatggagttattagattctttttcagtgtgaggcagaaaattctttggcaaacacagactttcactgggactagttgcgaaaaactgatatgcctttagtgagttgactaccaataaaatacatttgcagaagcttgaattttaatagggtgccgaccttttgccaactcagttgggagtgagaaatacgacaccttccagagtgattcatttcactccttgctgagcttctcttgttcatccttctaggaagacaaagcagcataaaatttaccattatattaagtggttaaaattatctttaccactataaaacatcagtggtataaagaaaaatcttggaattagaaatgtctttttccccacttgttatcatatccaacttctgccttcaagcatcttttagaaattggaaagcaaaaagctatttatgtaatttgatcttttcaaactgtttcatagatgattgttttttgtaatctcctgtaatatttgcttatctggcaacaatggaatattttgtccattgttttgctaacaaatttctaccaaatgcattgctcacattgcaccaaatccctttgtgaaagatgtaccaaaatggagtcatttatgtcaaactctaacaaaatggggtcaagagaggccacaaaaaaaatcctcgtgcacacatgcctgtaacaagggttatcacaagaccttcttcaaattgcactattccagataaataggttccaggacagttacctagcaacagctgtctttaccaataaacaaatgtcaactcctacaatgagcttttgacccgtgaacttgtctcaaagcagcttacctggacctctctttgtatttaaaaacttctcctgtgccctaaccccttggatgtgcctatgatccatcatccaccatagcatgcacattcctagattgcacttcgctgctctttccaattaaaactcatttgttctgaagagcatatgtgagtttctttttaggttgacacttctcatccctcaatgccaaaatcaaactcctcctatcagataggtgttcatctcaactagacttagctcttcaggaacaaagatctcagtattttgtaatctagttcacacacacacacactgtggaggatttgcaagggatgtactttgaaatggctcatgcaggatgaataatatttcagcttgcagggaaattacatatgtgagaagaacgaagaacgcaatgcacagaagttttgtggggtgagtgatgatgcttagtcttctttgacctaattcctggcacatcatgggtgctcatagattatttatatcaaataattaacttttattttactttcactcaagataaatgtatgcatgtgaaaataatgtttctgcttttaaagttacctctaattaaaagtgaaatgaatattaaatctatcttttataatgaatatatccccaagttaatcataaccagtaaaccaaggcctgttaagatagagcacctcttagaagatgaacggaggatggaaattatggttttagtgcgtaggggaatattctgaacaatctttatagtccttgtatgtgaatgtgcacttgttctcttctcattacacaaggcaacaggatcaaataaaccataattggtaaaggtgctcagttaggttagccagaagtctgggtacaactttacatggcagtagtattttaattatggcttctttccattatactacagatgcaaagaccgtacacactacccaggcatttctcttagctcaaattctccatcacaaccagctatatagcagctttcctgaatcactgtggtatcaaagtcttttaattagttttcctctattcctgtagccatatcaatgttatttaggggatgtccagcagtctattatagccactattaatctcagctattttataatttctcaaactcaatgtaattttttaaaagataaaaaataactacaattttttaaaattaaaaatgtacgtaagttacttttggaacttggaatactcttctaaaaatagataccactataattttttcagaaagtaaaattcttcatatatgtaacttaaggcaatgcaatagttttatttatttatttatttatttatttatttatttattttttaaacagggtctcactcccatggcccaggctgaagtgcagtggtgtgatcttggctaactgcagcctggagttcaccagctcaagagatcctcccacctcagcttcccaagtaactggtactacaggaaggcaccaccaggcctggctttttgtttttttaatttttagtagagatgtggtctctctatgttgcccatgcttgagctcaaatgcctgggctccccaccttagcctcccatagttctaggattacaggcatgagcccttgtgcccggctttatacaatagttttaaatataaagagccacttctttattaagtaaattagaagacatccctctaagaatttaaacacatttaaatatatattcactatggatgtgtgtatatctatctatctatctatgtatctccataaattttgagaaagatcaaatattatggttatatatttactgaattaggaaattttgccgaaatactttgcatcactcatgtcacctttttataaagctgtttggatctgaaagtgctttcgtggatttcacactaatgctttatagcattgaaggagctataatcatagaataataatttgtcatctgaggaaatgatgtcatgcagtcaaaaagctgcaagcttgggattggaatgcatgtccctggctctgagtccaattctttcttccagtaggctggtgcaaaggtaattgtgatttttgacattaaaagtaattgcagaaactgtaattacttttgcactttacatgatgcaaatgcatgaaccttaagagaaattgtatattctcttcactttgtatttccataaacatggccctctagcatgcatctcatatttgtacatattattgaatatgtctcctttgaaatgttgaatttcccttactttgactgtatcaatatgttcattttaaaaatcaaaatctcttacaaatttcagtgcttgaagtgatcctcaatatctgtcctcaatccatatcccaagcaaaattgcctttggggccttcctaaattatttttctttctctttctaattgcttcattctctttcattgtaatggttcttttattctcagccttataaccatgctcaatcttcttcaatccaaaaattttaaatagtgccattttctctatgattatatagctcttcttattttatatcagaattatctaaagaggtatggaatcagcttgtcagctacctcactttttattctcttttcaataactgatatgattaggctttgtgtccctggccaattctcattttgaattgtaattgcaataatccccaaaatccccgtgtgtcaagggaattaccaggtggaggtaattgaatcgtgggggcagtttcccccatgctgttctcctgatagtgagtgagttagcacaagatttgatggttttataaggggctcttcccctttcactcagcacttctccttcctgccgctttgtgaataaggtgccttgcttccccttcgccttccaccatgatcgtaagtttcctgaggtctcctcagccatgctgaagtatgagtcaattaaatctctttcctttataaattacccagtcttggacagttctttacagcagtatgaaaatggactaatacaattaccatcttgtttctgtctggtttaaaactcttctggaattgctctgacatggtcagcagtagcctcaatgctgccatacgtgatgtacatttttaggattatcccatgtgaacatttaaccatattcaacacaggcgactatgtccttaaccttaaatcttgttcatctatatacttccatgagattacagttctagtcttctatctaactttcacctaattctttgttactattagttggatttctttcataatattccttaagacttggcgctgatccctggacatattctctctatagaggagacatctcccttccatggcttcaaataccatccatattctgtgacactgaaatattcaaattatctttccagtctgtatagttttttcttttttaattctagacctaaatacccaagtacttcttgccattccacttaaaggtttcataagggtgttgaacttctatgtgtatgacattgaacttttgctcttctcttgtgaggcagaaacattttttgtttcctattagtaaactgcatttccacctatctagttgtttaactgagacaatttggaatcctcctaacatacgcaatctaccctgaggattggccattttctttcccaaatctgtcttacatttatccagtcctattactgctttctgtgtagttcaggatttctcacccttggtaccaggggcatttagggctggatagttttttgttgtggggagatatcctgtgcattgtaagatagttggcagtattcttggcgtctacccactagatgccagtagcacaactcccccttaaaattacaattaagaatgtctctgaaaattgcctaggggagagagcaaaattagccctggaggaaaggcattgtcctagtccaaggtagtctcctttcttggtggaacaaccaaaaataatgtccaagattctctgcctctctttttaaaaaaaaaattgtctcctccagtctttcttctacactcctgcctgattttttctttcattctttcttttctttctttcttttctttctttctttttctttctttcttcctttttctttcttttctttcctttctctctctccttcattcttcctttcttctttctttcttccttccttcctttctttcttttccttccttccttctttcccctttcctttttcctttactgttcctattctttttcctttcctttttcctttcctttcctttcctttctcctttcttttctttgccatttttctgcctgatctgaaaacaaaaatctggtcatttcactttcctgattacaacttcctggttgacttaccgtacattgaggatgaaacaaatcctctatatgatctgtaaagctgtgtaattgagtccctgctcatgtctctgacttcatcttcatacagtgttctttgtctttctcacaaacacactggtctttgttccacactaaagtatctcaagctttttcctaatccaaggacacactcttctctctgccttgaatgttttttcttcatctggatgaaaataattaagccttttctcacctcaatacattatatctcaagataaagtaggttctcctgttgtgatttgtaatttatctctgtacttaattctaatatttaaaaaaattgtttatttcttagactgtcttctagactagagcagtgctactagacaaaccagtccatgacagttcaccaattggccataagttaagtgtgtatatcaatatgcaaatgaatgcatggctaccttccttaagaagtcttgcatgattaacaatttcagcttaaggaaatcatatgtcaaatatacctgctttaccctgtaccctgatctatgatccactctttgaatgacacatctctgaattgtaatatctaaagttgagttggaggcaaatactatctgtgttctttcttatttgacattaaattctcagctcaagagtagtcaaagttgttgttcaataaatacttaatgataaactagataattactggttttatcattgctgaatatctcctatcttatcctgttcctagacctctaaactcctcttgaatgctttacaacagtaaactcagaggagtctcaactgccctcttaatcagtaccacctggcccagacttgcttctattcctttgcaccctaacttagctataatagaccatctatagtctgaatactaaataaagacttgttaaactgaaccatcctgtccaatttttttaatatagcaaagtgaaatttgaaagctagagagattcatttcaagtcaattcagcaagcatgcagtgaagtgtaggcattgtggtgagaggtgagaatagggaggtgagtgagagatagccctatccctgaaggaagcatgtcttaatctttctctggaaaatgagtggaagtatgttaatagaagataagtgactttagagaaagtgtgtcgtagtccattaaattcaatcacttttgctgttctttcagaccctgaagctactagtcaaagctaaatagagtcttagatcctttgcatttacatatcctgaattattttgaatcttgttagtgttttatgtagaaaaatagtaattcttggattaaaaattattgtaggctatacgattttttccctgcttgtagaaagttggctgtccttgctctgactttacacactgcttctgacaaaatcaacagccaagctatccaaatagtaattcgtcatagtaaaaatcatgcaacttcagtaagccaacaacttaaaaaagctcaaggaaaaactgtttatacttgaattccttaaaagattactttattaaataatagcatttctgtcacattgtaaactaacgagcacatgaaataccccctaatttctattacatataatttcaattttcagacataaatttttagtgtagtttctcaattttttttttttatcatataatggtgacagaacctgtctctctaagagaaacgaactagtttatggtcaaccagttcgtaaaacggcgtttgtggagatgaatatgagggaaagcagcatttcctggcagtgtatgaagaggcattaagccaatttgtagaagccatgcctgtacattggtctatagcaagttgacaggcttttcttagtagagaagtagtttgggtggcaagaagctgggaccgtaattcaagctttgggtactactgggtctataacttaaagattggaatccattgaattcatagcctagaaagcaccctgtggtagaaagcatgatgtatgtctgccggagggcttatagtagctcatctgagagtcttacagagagacccgtcttggtggaaactagaaaagcagaggtcagtggggtggaccaagtagctggggtaagaagagacacaggattagaccgagtagaccaagagttccccaagtgagcaggaaaagaagtttccagtgtagcagcttaatgtgtgactgctgtatctgattcactttttattagtgtcaaagggtgtgtaaatgtcaccttattgcctagaaacttatgtgctctgaccctgtggttatgatgttttagatgcccagctttactattcttctgccttacaatttgactaagaatatctccttagtgtgttgtccaatttcagctgaatagattaacaccatcataaatatgcatacctgtgttttataaccaaaagccagtttactgtcagtcttggacttcagatgattgttgcatggtcaaagcaattggtcaatcattggcagattaatttttgactgagaggatcacttagaggatgctgagatatagctattttttttcctccctgcttaaagttttatattttgttgtgattcttttctcggtcattcctgatatggtttgccatattaccaagcgcatgtttatgtttactaacaactaatataagaggtagaaatgatcatgatactctaaaaaagttgaaaaacttttattaaaaaaaaattctacttgactctctttaccagctggatgggtatagaatgccttatataaggggacttaaattacatcagttaagaagatggaaatttcaggccaaatacttttaaaaagtaatctccgttgggcacgatggatcatgcctgtaatcccgacactttgggaggccgatgcgggcggattgcctgagctcatgagtttgtgaccagcctgggcaacacggtgaaaccccgtctctactaaaatacaaaaaattagccgggtgtggtggtgggtgcctgtaatcgcagctactctggaggctgaggcaggagaattgcttgaaccctggaggcagaagttgtagtgagccgagatggcgcccctgcactccagcttaggcgacagagcgagactctgtctcaaaaaaaaaaagtaatctctcaaatttatagtgtggaaacttttaatggccccttagggactgcgtttataagcagtaaaacagatacgaaattattttcttcaagcaccttgaaaattgctgaacaaataaaaagttccaaagtaatgttgtagatagtcacatttccttattatgagagaggggaaattacatctacagatgagcctagataaagcaatgtggtggcctggagaagagcagacattggtgaggacaagaaattaatggcaaagaaatgggtctaaccagaaacatcatagaataaaataaattttaaaaaatggatacaaaaaaacattaagggaatggtgacttaggttacacccaggataaaaatataaaggaaataaagtaaaacacacttttttttacatatgtatgatgtttgggagggaatgaattacagtattgtgcactctagtggatatgttaaatgttttgaaattgacatgtgtaccgcgtaaatgtttaggagcttctaaacatttaaaatgtgccaaacaactaatacatgttgttaaatactaaacatattttaaaggtataaaatgtgctaaatatttataatttctaaacgtttaaaacattttcagcaaaaaatgtttagaaatatgtttaggataaatatttcattttagtgtgcataaaagaatatgacgtgtatggcttactcgaagcacccatgtgcatttagtttttggccacaagttgcatacatttatagtctaataatagttaacatttatggagtgatttctatactcaaggaattcttccggctgcttcacatatcctatcatttgcctctcatcgtaaccccatgatcaaatttctatcattcatgatctctctttaacatttaaggaaactaattttttgagaggttctataatgtttacagggcaaatagctggtgttagagttgggaattcagatatataaatatatatggtgcttcttcaggatttacatgctttgacaatttaaatgggttcaatctcacagcaggcagagtaatgtgcaggtaaaaaaatacattattaactaaatgcttaaatcttctaaggaatgtttctaaagcacaaaaactgagaagatcctggaagtgtagaaaccaaagtggggaccctgagcatgacattctgatgattaagcactcctattatctggaggacagcatgggagaccaggcaaaacttgggatatcagttggttactagacctagcagccctgactcctctgtctttttaagcaggttgatccttacaaactatttaccttccactagaactatcctagatcttctttcattttaggaagattgttactgttagtaatcaagttctgacttaccaaagacacgtagccactcaggaatcatatgcctattaacaggcaggactcctttggacagtatcaattctacatgatttcagcaacttgagggcaatgcaccttcattttctatccatattggaaaggctttaaagttcagccagcaaagatgataacttatggtgtccattcattttgagtttcaagaccatcgttaagctacgtcttgtttgtcatccccaacagaaccatagtagatgttcactatttgggtaatggatacactaaaagctcagacttcaccactatgcaaaatatgcatgtaagaaatttgcatgtgtaccatctaaaaatataaaaattaaaaaaaaaacaatggtgatgtagtcatgattatctgttgccatcaagaatagaatgtgttagttatgctggtagtctaatgggtgcctagtggcattctgttttaatgttggtttttttctaactttttagtagctctcattatatactgcagtaattaataggggtttgcccagaatagtatttcaacaggtaaaagattactttaaaaaaggtttatgcatttgtttatttttctacctgttttactcagactgaacataacaatcagttaaaatttagaaaagcaaatatgtttatttagttacaagtaaactttattacacaaaatttatttttagccatagttgaaaaaacaacaatttatttgcttatactcgaaatagcaatgccctatgggaatctcagtaatgccgatcaaagtcctttctatgcttttcctgcttgctaaaaggagactaatatgtgaacactgacaaacgtatgagaatcatatattgaggggaatgtgctcagaaaacaaagatgtgctcaaaggacaaagatgtctgaggcacagtaccttcaagaaattcaaaatctaaaagctcatactctatataattatcatatatttcttataatagacttatgatttattttcataaatattttcacttctcagattatttcacttctcagataaagatatatttatcacttctcagataaagatatagagatatattaatattttcacttctcagataaagatatagagatatattaagtaatttgttaaaaaattattttaacaaaaagttataaatccaaaaagtgagactagttctgtctgtctgcagatatttcattattcatccctactttctgtgtttgttaagccatgatataaggctaacaaatgctgaggataaaatgtatgacacaggtgaggtgattttattattaagctccttagcacttaaaactcctcagaagaaggacgaaagtggagggaaagaatagactatcccagacagagtactaatgcaaatgacagaaggtagggagtagaaaaacaaacggcagatcattttaggatccataactgtattattttcttgtctagaattttaaaataaaaccttgctgagtagaattccatctcatggcttcagtaaatgtaggcttctgtacaaaacgttactctccatgtgttcacaattgattaagataacatttctgcatcattttccccagaatgaagtttgcagctcccaaggatgtactaaatgtggttgactgtttttcctgttctctctagtgtaataatagaccatggtaaattaccctaagattgtcaaagctaaagcatttttcaaatttggtttataagctggagaatatgaacagccaatggcacctcttcaccttacaatatctgtagaacacagacagtgaagtctctggaatcaattttatagtcaagacattaacctttgtggtcatttgcccagcagaaagagtaagctgttaaaaaacacaaaatcagccactattcacctctttttatgattatgagtgtgttaacagctttcccttcaattacatgactagggttattttgccagtaaagtaccaaaaagataatatataccagaagcaaatttagatattgtctctttgcagaaatgccctgaaatgagggcaatcactcattactttgagtatagattttaactaaaatttgtttgactgaaaattacaatattatctagcccaaagaaacttgggaaaaacagtgttgtgtttctttcaactccactgtccagaagaagaaaactagaattctccctctcattcttttggaaagtcataaaacacttgagcatattaacaaacttttaaaaaggataaaaacaaatctgattaatgtggttagcccaaattaatcatataaatataaactttgtatccaatctattaatatttcttaaaaccagtgtctcaagcaattaacatttgaggagaagggctttagtcatttgagattggaatggaatggtattactggtatagttcaggaaactaactggagattaaagggatacctactaaaataggtggcaaacattaaagaaaagaaaaaacttagggcaatttctaattctttgactttgctcactacttctatagctacccttactagattaagaacttcctatatcagtaactacatcttcttcaataacaatcaagctgagaaacgaatcatcaactcaattccatttacaatagctacaaaaataactaggaatacattgaaccaagaaggtaaaagagctctacaaggagaactataaaacactaatgaaagaaatcatagatgatacaaacaaatggaagagcatcctatactcatggattggcaaaatcagtatcattaaaatgaccttactgcccaaagcaacctacagattcagtgcaattcctatcaaataacaacatcattttaatagaattatgaaacctaaacttcatgtggaatcaaaaaagagccccaatatccaaagcaatcctaagtaaaaagaacaaagctgggtcatcacatttcttgattttaaattatactacaaggctataataaacacaacagcatagtactgtataaaactagacaaatagatcaatggatcagaatagagaacacagaaataaagccaaatacctaaaatcaactgatctttgacaaagtcaacaaaaatatacacaagggaaaggacaccctgttcaataaatggtgctagggaaactggattgtcatatgcagaagaatgaaattgaatccatatctttcactgtatacaaaaattaactcaaaatggattaaaaacttaaatgtaatatctgaaactataaaaaccccagaagaaaatgtaggaaatctcttctagacattgacctaggcaaagaatttatgactaagaccgcaaaagcaaatgcaacaaaaacaaaaatagaccaatgggacttaattaaactgaaaagcttctgcactcctaaagaaactgtcaacagagtaaacagacaacttacagaatgggagaaaatatttgaaaactatgtgtccacaaaaagactaatatctagaatctacaagaagctcaaacaactcaacaagaaaaaaaaaaaaaccactatcaaaaagtgggcaaaggacatgaacagacatttttccaaagaagacatacaagcagccaacaaacgtggaaaaattctcaacatcattaatcattagagaaatgcaaattagaaccacattaagataccatcttacagtaataagaatggttattaaaaagtcaaaaaacaacagatgttggcaaggatgcagagaaaagggaacactgttggtaggaatgtaaattagtacaaactttatggaaaacagtatgaagattcctcaaagagctgagaatagaacaccatttgatctagcaatcccattattgggtgtctacacaaagaaaaagaaattgttatatatattaaaatcccctgcactggtatggttatcataacactattcaccattgcaaagtcatggaatcagccaaagtgtccatcaatgaatgactgaattttaaaaagtgatatataaatgcaatgtgatactactcagccataaaaaagaataaaattgtgtcttttgcagcaaaatagatggaaatggaagccattatcctaagtgaaatgactaagaaacagagtcaaataccacatgctctcacttattattgcgagctaaacaatgtgtatacctggatatacagagtggaataattgactttggagactccaaaagttgggagattgggagaggggtgagggatgaaaaattacctacaatataaactatctgagtgatggatatactaaaagcctggagttcacactacgtaatatattcatgtaacaaaactgcatgtttacccttaaatctataaaaataaaataaaatagaactttagaacagaagagtttccatacatcaataactgcatcttctcactttagttaacagactttagtattcttatactaatcttccagaaatgccaactaaaaaccttataacacatcttactaatgaataatctacttatgttctccacacgtgactaacttttgttaaacttaaaaaaaaaatcataggctcacatgaagttgtacaaatagtacctagagtcccttcacacagcctcctgcaatattgccaacttatttaaccatactacaaaatcaaacctaggaaattgacactggtgccatgttgttcgctagactacagaccttattgagttttgctggtttatacatgtactcatttgtgtttgtatctgtatggttcaatgtaatttatctaatgtatagattagtgtaaccactaccacagtccagaagaaaaattcttccatttatgattaacattttttcttttttttttagagacagggtcttgctttgctgcctaggctggattgcaatggtgcaatcaatagctcattgcagcctggaactcctggcttcaatactcccgcctcagcttcccaaggagctgggactacaggcatgcaccatgtgtatgaattacaatgttcatgtaatgaggcagaaatatgagccacatattttgtccttttatatttataaaatgtttaatttagttatatatgaaattaaaaatggaagcttgtgttttctagacaacaacactagacagtaatgcagcatttgaggtgagtggtgcaagtggtggtatagagcagaaagaaagatcaagtcaaaatacgacacatttatgtaattatgtcattttttccccaagtcacaagtagaagcagtgccattagaaatgtcaaaattttggatgaacctggaggacatcatgctaagagaaataagccagacacagaaaggaaaatactacatgatgtcatgtatgtagaaatcgaaactagttaaactcacaaaagcagagactagactggtagctgtcagggcctgggcggagggtaaattgggagggtgttggtcaaagggtaaaaagtttcagttatgcaggacaattaagttctggatatctaatgtatagcaatgtgactgtagttaacaatattgtatcgtatacttaaaatttgcagaaagggtagacctcagtgttcttgccatagtcaaatgatcaatcaaatggaaactgaaattataactatattaattaccttgactgtgacaatttcacaatatgtgtatatattatatacagtgtgtgtatctcaaaacatcaatttttactccttaaatttatataatttttgtagactatacctcagtaaagatgagaaaaagaaaaaaggcataaattgataaggtaaagtaattctttccaggaaatgatatgcataatttcttttcctcctcagtttccatattaaaggaaaaatgatattcagacttttgtagcacatctgttactaagttttacaattaacattactgatttcacatactgttgtcagaaaaaattgtgggattttgaaatgggggaaatgtattactatgtggcctgtctagttcatttttcaaggtattgtcacgtattattgctttttaactcctatataattctgtaagttgaataaaattgttaataatgcaaatgattctagtccatagaaatgaaatagtttctgtcaagtggaatgatactgatttttactctgcgtacagcactactttgcatctatctgtggattcatttcaaacttcctaacaacctgtctaagtgttctctgaattatgctttgaaccagttgtagcatcttagtggtccccacatttattaatgagttaaataaaaatttttatatgtgttgattttttcatttgtgtaagaattgtgactttacctttttaaaaatttatcttaatactattatgttttatattgtatcacattttaaacgtttgccttccctttctttaagttccagggaagcagcatgcaagacatagtgagaaaaaaaaagaaaataaaaatagttggagatcaacagagatgagatattaggattggattaaccatgaatgatttcttttgaacagctggatagagaattctggacttgaacagtagatacctgatgttttcttaattcatactgtggtgcctctcaagtaatagtctgcaaccctgagcttctgcttgttaatactttattagactgctaattgtaactaagtctccagttacataaactttgatatctaagaataacatgagccccccaaaaccactcccacatatgaaatgtgaagtttatttttttaattgtttatcgttgacatcttgccaccccagacacaaagctgaggccctctatggcatccgtgttgtttccgtctctatttctggatttgtagaattggacaatcacacttacttattattatgtagtcttctacctcttgctgaccacatttcccagtttaataaaaaaggaacttgtagttttgtccccgaaacccacactgtattcttccaagcaattatgccaccgcttacgcagtttcctcttgctggcgctctcttctcacgcatccttcacaccaaaatcataggaggaaatttgtctctctcactagtgagagacatgagtctagtgacattggtcttttctaagctctcagcacttttcacagaagagctctagtgcaaagttaaagctcaaacacatctagtgagctgaattagaacaaagagctgatgtcacttggtatattaaggtcattaggagtggaataattataagtgagcttgaaagcaacttatcttttccactctgctttttcttagccagtgatgggagtcagccttccattacactctctgttaccctcatacaacttaggcgttgacccacagttaccaggtgcctaacttgacagcaccctaaagggtgagtgtggagaggagcagagtgtacataaaaactgaaaaatcacagagagaaggagagaaagaagaaaagcaaagagaaaaggtgagagaggaaaataaaaaatagttggagattagcagagatgagatattaagggaagattattcatgcagaaaatggaggaggcaaagaatatttattttgtctgatccctgaaatctgaatcttcacattatactttgaaaggtttaaatattgaaagtattccaatgtgttaattttctcctttactctctgcctccctgtctcaattgtttgcattccacttaaagattgcattagaatggtggagattcttcaagtcactacagaactagattctctatgtcactggacaccccttccttctatcttgggattgctgcattttaaacatttctctgtgctcagatgtctccttgcaaggcctggtgccttccacacttgaagttatgagcctctagctcccaggactttcttactgtccatgctactgtgacccctttagtttgttttctcaaatgattttttttaatccacattttactcattccgcattatttaaagatgaattagtagtccaccttcaatgctaatggcataattcagactcataggacctttatgtctaataaaaatttttaattacctatttacaccaaagtcaatgagtagctctgcacttgatgacatatttttttttttttttttgagtcagagtctcacactgtcacctaggctggagtgcaatggtgcaatcttggctcactacaacctccgcctcccaggttcaagtgattctcctgcctcagcctcccaagtagctgggattacaggcaccagccaccatgcctggctaattttttgtatttttagtagagccggggtttcgctatgttggccaagctggtctcaaactcctgaccttgtgatccacccacgttggcctcccaaagtgctgggattacaggcatgagccaccatgccctgcccaacgatacattttgtttgtttgtttgtttgtttgtttgtttttaattatactttaagttctagggtacatgtgcacaacgtgcaggtttgttacatatgtatacatgtgccatgttggtgtgctgcacccattaacttgtcatttatattaggtatatctcctaatgttatcccttccccctccccccaccccacaacaggccccggtgtgtgatgttccccttcctgtgtccaagtgttctcattgttcagttcccacctatgagtgagaatatgtggtgtttggttttttgtccttgcgatagtttgctgagaatgatggtttccagcttcctccatgtccctacaaaggacatgaactcatcattttttatggctgcatagtattccatggtgtatatgtgccacattttcttaatccagtctatcattgttggacatttgggttggttccaagtctttgctattgtgaatagtgccgcaataaatatatgtgtgcatgtgtctttatagcagcatgatttataatcctgcgggtatatacccagtaatgggatggctgggtcaaatggtatttctagttctagatccctgaggaatcaccacactgtcttccacaatggttgaactagtttactgtcccaccaacagtgtaaaagtgttcctatttctccacatcctctccagcacctgttgtttcctgactttttaatgattgccattctaactggtgtgagatggtatctcattgtggttttgatttgcatttctctgatggccagtgatgatgagcattttttcatgtgtctgttggctgcataaatgtcttcttttgagaagtgtctgttcatatccttcgcccactttttgatggggttgtttgttttttttctcataaatttgttggagttctttgtagattctggatattagccctttgtcagatgagtagattgcaaaaattttctcccattctgtaggttgcctgttcactctgatggtagtttcttttgctgtgcagaagctcttttgtttaattagatcccatttgtcaattttggcttttgttgccattgcttttggtgttttagacatgaagtccttgcccatgcctatgtcctgaatggtattgactaggttttcttctagggtttttatgattttaggtctaacatttaagtctttaatccatcttgaattaatttttgtgtaaggtgtaaggaagggatccagtttcagctttctacatatggctagccagttttcccagcaacatttactaaatagggaatcctttccccgttgcttgtttttctcaggtttgtcaaagatcagatagttgtagatatgtgacattatttctgagggctctgttccattccactgatctatatctctgttttggtactggtaccatgctgttttggttactgtagccttgtggtatagtttgaagtcaggtagcatgatgcttccagctttgttcttttggcttaggattgacttggcaatgcaggctcttttttggttccatatgaactttaaagtagtgttttccaattctgtgaagaaagtcattggtagcttgattgggatggcattgaatctataaattaccttgggcagtatggccattttcacgatattgattcttcctacccatgagcatggaatgttcttccatttgtttgtatcctcttttatttcatttagcagtggtttgtagttctccttgaagaggtccttcacattccttgtcagttttattcctaggtattttattcctttgtagcaattgtgaaggggagttcactcatgatttggctccctgttagtctgttattggtgtataggaatgcttgtgatttttgcacattgattttgtatcctgagactttgctgaagttgcttatcagcttaaggagattttgggctgagacgatggggttttctagacatacagtcatgtcatctgcaaacagggacaatttgacttcctcttttcctaattgaatacgctttatttccttctcctgcgtgattgccctggccagaacttccaacactatgttgaataggagtggtgagagaggttatccctgtcttgtgccagttttcaaagggaatgcttccagtttttgcccattcagtatgacattggctgtgggtttgccataaatagctcttattattttgagataagtcccatcaatacctaatttactgagaatttttagcatgaagggttgttgaattttgtcaaaggccttttctgcatctattgaaataatcatgtggtttttgtctttgcttctgtttatatgctggattacgtttattgatttgtgtgtgttgaaccagccttgcatcccagggatgaagcccacttgatcatggtggataagctttttgatgtgttgcttgatttggtttgccagtattgtaaatctttgtatgagagtgccagaagtcttattttatttcaattattttatttagtttaaacctaaagaagactttattgacccatatgatcaaagcacttaaaggatgaataaagctggcttaaggtacatgggaatcagaggcttctgtgttgccaggagtttcttcccgtgtttcccttctctattcttctagtttctgtggcggcaggtttctatgatcagaggatgtggttcccacacttccatgcttagcccgtattgtctccattataagagaaaagataccctcttttttcaggtttaattataaaaagcttaagggaaaggtgtcagggaaaaaaatcaattaaagctcgtgacatattattggaggaaatgataatctttcaaagttgttttcccattcatggagagttgttattgaatattttatgaaaaagttttagctgaacttttacactacctttagcctctgaaagaaatcacttgcttaaattaaaataaatagagaaggtcttatatctcagatgtgaatagcatcctacaaatatttatttttattcacactgtcacagctgagcagtggattccaaggatactgagggaggttataaaatctagaacattgaaagtaatctaattttaactgccactcaatgcagaaatcactgaaaagtaatatctttttccttgttgataaactcaataatccaaagaaaacacaaaggtcataatagttctataaatttatgatttataaatatacatttaaaacaagccaaagtatttctccctataactgtttccattactcacagttgtaaaccttaagtctttctgtcttctgtgctctctctctctttctcacacacacacaacacaaacacacacacacactgaataattaattttctcctatatttaaacacaaccgtaatgtcctccagtacctaacatttcatattttcccttttccatcataacatttcagatttattcaaatatttcataattttatatttaatcacctagttgacatcttctgagaaaactctaaatactcttttaaaaatgtaaacaaaaagcaaatatgattgtcagcaaaatgtgtcttccttgaaaacacaccaccattatgagtgtactctcaataattctgttaagaatccaaccagttttcatggcagaagacatgcacttgctcagtcttttaggcactggcatgcccggagaatctccccacacactaggcctgatgacattaccgatggaaatggatgtccaaggaaaagacgtctgggggcctggagcccccaaaacagatcacaaatcaaactttggaaaccaataaaagacaaagagaacatattggaatcaacagtaaatgaatttattacgtgaaacaaaactgaacttccatatactttataagatgaacttacgtgataacgaatcacttgtttcaaaattatagacatttgactctatattttgctcattcattaatttcacagtctgaaagaactagcctgtccagccagtacttgatgccagagaaaggatgaagagctagtagtaagaggggttagctcacattgctggaaatgcctatgataacagctctacgtagagactgagacactttgcttaaaaggtctggaaattcagcaagttgatctgcagaaggttgatccataggctggtctgtaacaaggagactggcagctcctagaagccaagtaggttgggcggcagaatccagatccatagccgagggaagggaagccacagcttccataacccagggatctgacaccactggacccacagcccactgagtagcagctcctcgatccatagcccagggagcggcagctgctggatccaaagcctagagacccagagtaagtcgtcttgcaaggactgcagagcaaggaggttctggggcggtagcaggaggtctggcaggggctggactccacataggacgtctggcagctggtgggctcccagcagatctcctgacagcccctatagagagaggaacccagctggcaggtgctgggagagcagaggtcagtgctgtagaccagattgctggggtaggaaaagccacgtgaggatgctgggtagcgcaggtagtcaccacaggagcgggaggagaagtttccagagcagcagttgtaggacatgttgacgggagatgtgagttcagctgagttatagtggaaagattctctgagtttgaatgtcatagtctggactccaagttatatatgctcttagacctgggtgtgtccactgtctcgacactcccttctccttgctcactttttattataagaatgcttccctaggttattgtttaatttatcacatcttcatatacttacttgtactttagtcactctggaacacttagaaggaagccactcagtttttttttttcctggaattcactgtggtttgaccttcaatgttatatgtcatcacatttatgagtatcttgcctcttattatttgagtacagtgagtccttattgtaccaaatggaattacacaaaattctttctttacttcccttaagttatcaggagcatcagtggttactactcaaaatagattgtccttctttttaacacaagcatattatttgttaccagaaacggaggatttctccaaatactaactgtattcagtagcctcagcaatctgtcagttaaaccttttactagtaccttaagagctcaggatcagaactgaggagtgcagcattatgttgggtgtccatatcaggcatcttccttaacaagaggctactttagacaatgctcacttaggaaacaataaacacaaactttttagtaagactttaaattgaagtttttcagatattttctgatgaacctatcttgtagcaagcactattctatggttatgctctaaatcaactcataaattttattttgttttatgtttcaatttttttttctggataaaaggacagattcttagctgcaattattaatttatacttaaactttgaggaattgttaacatttttctgaagcttttaacttgaagtattagagttatatgggtctttaaacatcccctgttcaacccatacatggaaaaattacctctcagagagctttaactttcccctaatttctcagtaagatagaagcaaaattgaagctttaattatggttttcttattcagagtcaagttgcaaataccttgcaaatataaaagtaaattcaactttaacttgtctcagaaaagaaactattaagcttatttatactaagatataaaagcctaacaaagccttatttacttttcctaacaatattcacactgaatagtgttcaactggggaattctatgccttactgatcttcatacatttgaagtatatttcacttcctagcccaagaaagagaaagaatattggtaatccatgtttagattaatggggggaagaggcttcttatctgtgtctattcttcttcttttgaatttgacattttatttggtttaactaagggaaatggcattcacaatggttatcgaaaagagagcctcttaactacctgaaaattaacttccttcattccaaagcacactgtttcagagcacttagttactttgttttatgattatctctcccatgcagaatccaaagtgtggcatgcatcacatgaagtgcccttgtgcaatacttaaaccatcactctgattcactgaagtaaaataagctgtgctttatgaatggacacctattaaattcaccaaaaagtatgcaccacccccaacacatgggattccttataatggcagcttttaacacctttaaaatgagaaatatttttcttttcttactacaggttgattctgctcaaaaaaaagaaaacaaaaaacttactaatatccaaaagttcttgcctttctagaccagctccctatgtctgggaataaacactaaaataacttgggagtaagtcagttccaattaacagtccctccacccattcctaattgggttaacactttttattaggagttatttgtgcactttgtacaaatgctaatgaacaactcccaaatgctaataaatgtgtccatctgaaaggcagaaaaagcagaacaaaactagagtagccttaacagttcaaaagtggattctggaactaataaaatactctacgtactctacatacacaggcaaagtattagtatagaaagaaaaattcactatcttgatatgtcagggaaaacgtgatattgaaatcttttctctctctctccttccttccttccctccctccctctttctttttctttttctttcttttctttctctgcctctctttccttttctttttctttcttttctttccctccctccctctctctctgcctccttccctccctttctccctctctctctttctctgtttctctttctttctatttctttctttcttttctctttctttctttcttctttctcttttctctttagaaatttaggcataacaacactacagagaataaaactatcattacagtacacagtagccacaagtagcctatgatctgaattacttgaaaagtgattgtttttccaagttaacatagtaatgtagcagaagctttaaactgacaatcttctattgcaatgtttccagagattcttcaaaagctttcaaattaaccaaatattaggcagtagtagaaatagtaaaaatccatatatactgccctataccttttttactttcttttttttttttttttttccgagacggagtctggctctgtcacccaggctggagtacagtggtgcaatcttggctcactgcaagctctgcctcccgggttcacaccattctcttgcctcagcctcccgagtagctgggactacaggtgcccgccaccacgcctggctaattttttgtatttttagtagagacggggtttccccatgttagccaggatggtcttgatctcctgacctcatgatccacccgcctcggcctcccaaagtgctgggattacaggcgtgagccaccgcgtccggccacctttttactttctgttcactttttaattttctgccttctctagacctaggagaggcttttattgtctggtcactaaagagtcttcataacagctgctttacactagattttatttttaaaattctcacccaaggggaaatgtatctattaaacattaatgctaactatgaagaacccactactgagtaaaggcttgatgagaactccctggactaacctgttcatggtctcttcccagtcccccatgcaagcctacccaggcctgtggctttctcggaggtcatccggcctcattgtttgagacttttccaggccctggcacctcctctaacttcactacagctcttcctgcttcaaattcatccattttatgtcttcatcatccatgactttcgtttgaaataaaaaggccaggctgggcgcagtggctcacgcctgtaatcccagcactttgggaggccgaggcaggtggatcacgaggtcaggagtttgagaccagcctttcaaacatggcgaaatcccgtctctactaaaaatacaaaaattagccaggcgtggtggcagacatctgtaatcccagctactggagaggctgaggcaggagaatcgcttgaaactggaaggcagaggttgcagtgagccaaggtcatgccactgcactccagcctgggcgacagagtgagattccgtctcaaacaaacaaacaaacaaaaagatttataaacagcctgcttacacacctctcggttcttcttatctcttctgagaccttacccttgcatttactgaaaacaaatagaaaattaaagtaaattctagagtcattttctggatgcctaaactcacaattgttaccacgttgtcagatttgcgttcatctttctcttttttattttaaatgtttatggatacataatgttgcgcatattaatggggtacatgtgatattttgatacaggcacacgatgtgtaatgatcaaatctgggtaactggcatatccatcaccttaaacatttatcattttttttgtgttgagaacattccaaatctacttttctagttattttgaaatatgcaatacattattgttaaccacagttgctgtactgtgttactgaacactagatcttattcctcctatctaactatatttttgcacccattaaccaacacctctctgtcctttctttccactacccttgcaagcctatggtaaccaccattctattcgctatcttacagagagagaccccttgtgggccagtctctcagtctgattctttttcatatctttccaaaggcatcacaataatgcattcgtttttgcatagcattccaggaaattgtctatacatatatttatcggtttataccatttattgttgttttaagttacaaaaatgccatcttattggatacatatatgtatctgtagctttctttttatattaaatttatttaaataaaaatatctaaaacatatccaagttgatatttatatatttgtgcatttattatcactacagtagaacttttaaatgtcaggcactgttctcagcactgtattacaaatattaactcaatcctcataataattctacatggtacacaccacttttattcttgttttatagctgaggaagctgagacacaaacagattgagttacttgccaaagctacccatgtagttagtagcagagatgagatttgaactgcaatactgacaccattgtcagactttatgcaaataaccatgttgctatgatacacacatctagtttattccttgttacaaatttatagaattctactgtataaaaatattttattgatatatcgctctaccattcttgattttttactatcacaaaccatgtggcaagaaatatacttctatataggcccttgcatctactgtctagggcttctggaacatgtatatttagatgcaattgctggacatacataatttcaattctagcatggtagttacgatcaaggcttttggattcaggctggcagagtttgaatcccagctccatcacttagctgtgtaactcagacctgttttagtttctcatattttgttatcttttagccattattctatggagtcatttgttcttttaaatgtatttttagagaatttgtgcattctttttgtatgcctttgtctttcatatgttgctaatatattcctctggtcagttgtttgactcttttgtaaagtcagatctgtggatacacagttcccataaaatgaaatgcaccatttttaggagtacagttcaatgggttttttcctttctgttctttttttggtggagggggcaagggcttgctctgttgcccaggctggagtgcagtagtgtgatcatagctcactgtagcctccaactgctgagctcaagtcattctcctgcctcagcctcctgagtggttaggactataagtgcataccacaacccctagctatttttttttcttttttttttgtagaggcagattctcactgtgttgtccagtttagtcttgaattcctggcctcatgcaatcttcctgccttggcttcccagttcaatgagttttgacaaacatatatagttatgtaatcatcaattgattgagatagagtatttccattatttctagaaattctcctgtgctcctttggatcaatctgcttccccaatatctaaatttctgttcctatagtcttattttttgaactgcatgataaaaggaattacacattacgttgccttctgtgtttaacttccttcacagagcataatgcttttgaaattcatccatgttgttgcatattccagtagtttattcccttttattgccaagtggtatttcattgtatgtacgctatacactagaaaatggacatttagatgattttgagtctggagttactgtggataaaactgctataaacattcacatacagataattttgtggacatatgtaatatggtttggctctgtgtgcccattcaaatctcatctctaattataatccccacatgtcaaggaagggacctggtgggaggtgattggatcatgaggacggtttccgccatgctgttctgatgatagtgagggatttctcatgagatctgatggttttaaaagtcccagtttctgcctgtgtatactctctttctctcctgccaccatgtaacatgtgccttgcttccccttcaccttccaccatgatgtaaatttcctggtgcctctccaaccatgaggaactatgagtcaattaaaccatttttctttataaattacccagtcctaggtagtatcttcatagcagtgtgataacagactaatacagagaattggtaccagcagagttgggtactgctataaagataaactgaaaatgtggaagcgacattggaactggtaacaggaggaggttggaacagtttggagggcttagaagaagacgggaagatgtgggaaagtttggaacttcctagagacttgttgaatggttttgaccaaaatgctgatagtgatatgaacaacgaagtccatgctgaggtggtctcagatggagatgaggaacttatagggaactggagcaaagtcactcttgctatgctttagcaaagaaactagtggcatttttcccctgctttagagacctgtgaaactttgaacttgagagagatgatttaaggtatccggtggaagaaattgctaagcagcagaacattcaacatgtgacctggcttattctgaaagcattcagttatgtgtgttcacaaagagatgctttgaaattggaacttattttaaaaaggaagcagagcataaaagtttggaaaatttgcagcctgaccatgtgatagaaaaggaatacccattttctgcagaggaattcaagctggctgcagaaatttgcataagcaacgaggagctgaatgtcaatagccaagacaatggggaaaatgtctcaggggcatgtcagagacatttacaggagccattgtcatcaccggcctggaggcctgggagggaaaaatggcttcatacattaggatcagggcttggctgctctgtgcagcttcaggacttgatgccttgtgtcccagaagctccagctccagccatggctgataggggccagggtatagctacagctgttgcttcagagggtgcaagtcccaagcattggtggcttgcaagtggtattgggcctgcagatgtgcagaaaacaagagttgaggtttgggaacctctgtctaaatttcagaggatatatgtaaatgcttggaagtccagacaatagtctgctgcaggggcagagccctcatggagaacctctgctagggcagtgcagaagggaactgtggggtgtgagctcccacacagagtccccactggggcactgtctggtggagccatgagaaggccaccatcctccagaccccagaaatgtagatccaccaacagcttgcattgtgtgtgtggaaaagccacagacactcaatgccagcctgtgaaagtagccatgaggactataacctgcagagccacaggagagaagctgcccaaggcattaggagcccaccccttgcatcagcgtgtcctggatgtgggacatgaattcaaaggaaattattttggagctttaatatttaatggctgtgctacatggggcctgtatcctttttgttctggccaatttctccctcttggaatgtgaacatttacccaatgcctgtacccccattgtatcttggaagtaactaacttgtttttgatttacaggctcataggcagaaaaggacttgccttatctcagatgagactttgaacttggactttggggttaattctggaataagttaagactttgtgtgactgttaggaaggcatgattggttttgaaatgtgagaaggacatgagatttgggaggtgccaagggcagaatgatatggtttggccctgtggccccacctaaatctcatcttgaattataatccccacatgttgaggaaggggcctggtggggggtgattggatcatggggggtggtttctaccatgctgatcttgtgatagtgaggaacttctcatgagatctgatggttttgcaagtagtaggttcccttgtgtgctctctctctctcctgccgccatgtaagatgtgccttgcttcccttttaccttctgctatgattgtaagtttcctgaggcctcttcagccatgcaaaactgagtcaattaaatcttttttctttataaattacccaatctcaggtagtatctttaaggcagtatgaaaacagactaatacaatatgttttcaattttcttaggtaaatacctatgcatgggattactggtttatatggtaaccacatgtttaacattataaaaaactgacaaactatattccacagtggctataccattttgcattccaatagcaatgtatgaaaatctcacttgtttcacagtctcaaccgcactgtatgtattatccttattattttgtctattctagttggcatgtaatggtgtcccattgtggtttcaatttgcatttctctaatgaataataatattgaacatttcctcatgtgctttttgcctcccatacttctcctttagaggtgtctgttcaaatcttttgaacattttctatgtgtgttatctcattataattatattcttactgtttttttacacagaagactaagattcaaatcctctatcaaagtatatgtttttacaatattttcttccagtctgtgacttttaatttcattttcttattaaagtctttgaaaacagatgtttctagtttgatgaagactaatttagctaaaaatctcttggtatatcgtgcatcagggtgacctggatgtgagacatggaatcaaaggagatcattttggagctttaagatttgactgcccagctggatttcagacttgcatagggcctatagcttctttgttttggacaatttctaccatttggaaaagttgtatttactcaatgtttgtacccccattgtatctaggaagtaactaacttgcttttgattttacaggctcataggcataagggacttgcattgtctcagatgagacttcggactgtggacttttgagttgatgctgaaatgagttaagactttggggaactgttgggaaggcatgattggttttgaaatgtgaggacatgagatttgggaggggccggggtgaaataatacggtttggctgtgttttcaccaaaatatcatctggaattgtagctcccatagttcctatgtattgtgaaagggacccagtgagagataattgaatcatcggggtggtttcccccatactgttctcacagtagtgagtaagtgtcaggagatctgatggttttataaggggttttcctttttacttgtctctcattctgtcttgcctgcctccatttaaaacatgcctttcgccctccatcgtgattgtgaggacccccacccacttggaactgggagtccattaaacctctttttctttataaatgacccaatcttgggtatgtcattatcagaagcatgaaaacagtctaatacaccatcttatcttggaattttcattgttagaatttttttactcttaatttaatttattttgtagatccagggctagtcaggctgtctaggtatttttgagtgagctctcttagtttgtgcctgttaagaaattttttcatttaatctgtggtattgctgtaagtgatctcagggtccagcaacaatggttatatcaatctgcttgatctgcagacatatcagaaatagtgacaacctgtctttcaaccataggaataacataagccattgctaggggcaccctggccagaaagtaaggcaagttcatttatattgtcttggacataaactgaaccaagaagagatgaaagcaacaatgtcatatttattatttcaccctattttgttttgtttctatgttaataacttctgccacagcactatacttgtccttttgtacagttcatgtgaataaaatattatcatgtatctttattaaaaatatgttaaagaaaccaaacatcttttgaataacatgactcttcacagcctacaattataatacatgctccagttgaacaggtgccctagttctcttctcttcatcattttgcatggacatgcatgaccacttccctacctgacttgatctcagtgtcttgcttggcagtatgttactgaggtgacagaatgtggtgacatgtttttctccttgcacttgtgaagtttgtcacttgagtgctagatggaccacttaactgatgcaggctagtagacgtcctcaatctttgtcagtttgcttttcagtttataaacactacagattcttctaagaagattgagaaatattcaatttctcttttgttttcaaaacttagtattcaaatctccatcttgaaaattgtcaaagacgcacgtaatctagcaaaaaagaaaaatttatagggctagagagggagtcagtaacagagttactgtgttccttgctttttgcttgtgtgttcattctaattcagcactatagcataacagaaacaaagtctcattgggaactgagcaaagcacagacatatttaacataagacataagaataaggtgttactaaacctaccaagtaaatagtgtgagaaaccactgattgtaatgttttatctcttacattaatagagatgagttttcatgtcttagaatggaaacaacactgaattacagcaagttattttagctcttacatatgccagaggcaggactggatggctgctgtaggtcctaacaattgcagaattctgtgacttgaaggtgaaaatcaagttcttataattcagtttccacaatgagtttccatatgactacattgttgtttagttttgttttttgctaggtagtcctacactgtaaagttgcagtgagattcaagaagcacgtgatcaattggttagacagatattgatagttaataatgaaaatgtcagctatttcttgaagagagttttagtcagggtcctccaaagaaacagaaccaatagggtgtgtatgtgagtgtgtgggggtgtgtgtgtgtgtgtgtaatatgtgtgtttgtgtatgaagaaagagaaatatttattttaaggaatttgttcatgcaactgtgggggctgacaaccctaaaatctgcaaattaggccagcaggctagagattcaggtaagagttagtaagagttgatgatgcagtcttgagtctgaattcacagtgctgtaagcgggaaactcaggcagtttctatgttgcagtcttgagaatcccttctttctcaggaaacctcagtctttattcttagggccttcaacaaatatgaggaggtatacccctattatttatgaagggctatctgctttcctcaaagtttactattttaaatgttagtcatatgtaaaaaatgcctttacaacaacatctacactggcatttgacaaactactggctaccatagccttgccaagctgacacgctaaaggtaactattgtgagtggttattcattaaggctttaatcagtgtcatcaaatcaggcattaaagtattagcaaacagttatttcatcagaaagatgattatttgtcattctagtatttactctttttgctgatttatcatgtcttcattttgtttcaataatgttaataatgtagaacttgtacattaaaatatgtagatattttaatatcattcatccaagattaagctatatttaaaatcacaagctttaatatatcgacagcactaaaaagggacaaaaataagaaactcttaattcatgtctttgaaaaggtaaaacaccatctgagaaagacattagtcttatttatatggattagaaaaaaatattagaaaatatatacaaaacagtgctattaaatgtaagctaagtcacgaaatactctatacctcatcatagtggtgaggctctgtctaaattcatttaccaaaaagtgcaaattgattttctataattttgatatatttactataatagttttgagaactctttactttggaacatgtggctataatccatgttatagaaaaccacatttgttaagatgtatttgttcacttaaagcttttgtgaatggtgctatagtatatgaatttaattcactgtacttgtgaacattaatatcttgactatgatgacactgaactaacaaaagttaactcattctagtggtgtgaaactccagaggttctttagagctagaaacatacctaaaagcattcctagttctttttttaaaaaaaaatcatgtaaaatggattagagggcctaatgcttaatttaggaacacaatgaggaatctcaattataaaaaataatagtagataacatttaaaaacattttatgcgcatttaaagcatttagccaggcattgtgctaagcattattcatggcacataagttatagtatttaactcatagtaaatctgtaataatttgtatatccttcttacagatgagctacaatagcagaaatgatgtagtgtgatagttttacttgagtctctactcttaacctttgcatgtactgcctcagtaatacaaaagatgggagatgatggttgggtggatggagaatgaaggattgaaggcagcagggtaaagaataaagaaatattagatgagcaaagtgggaaatactaaaatatttcggggttaaatcatgtttaagatctgttttggctccagtttttcaattatggtgaaaataaattttaattatattgatatctaagcatgatttatccaatacctgagatctactacagctttatgccaccaccctagacttcaaggatacaaaaaatattctatgtccccttaaggaaatgacaaaaacacttccaccctgatatcttaaccttttagtatctcaattcaactgaactccaaagagctgaacttgaaaatccacctcaaaacatgcttcctcccatgaagctttttctaccttttctctaacaaatcccactggttcaaatatatttgtcaatttcatcacacattcctgaaagttgacccttcatattatttcatgttaatttctagtttggatgccataggaaggtagacatgaaaataaaaactctaaaaagacaagaccaggactatgaaaaatcagaaagtaagctcatagaggagaaatcacagacatgacactaagaagttgaggaagtttagtccaagaaagcttcctggatacagagagatcaaaacaaagggatatagagcaacgtggcagctagatggaagggttggaaagtagcagaaccaacatgtgtccaaaggccctagcaggaattgtacatatgtagcctcatttaagtctccaaagaaatatgtgttattaccattcacattttctagatgttgaaacagagaccaacaaatcttaataacataaggtcacctctcataaatgatagaattatgctcaagtttaggtttgtcttactgcagatttcattcatttcattcattcacttattctatttatttcatttactcttctaagtatgagatttttaaacagaataggtattattcatttcgatcagatgagttgatatataaatgcataaataaaggaaaaaatgaagtttatgagttcacagcagtctaagttattaatataaaatcctctctcaaattatcctaaattctgactcttctaggagcctgaaatatatttcaagatggcaagaactgtattctaactttaggttgaatttggattctgcttatttgagataacacttaggtctcaagtggaacagctagcacagtagaaagaacttttctcaacacatttcttaagttatactctttgatttatcacacaagggatggggaaaagctaatcactattcagacttaaaaaatatatttttgtggctccacgtttggatagagaccaagagaagaaaataaattaagtaggagagctaattaagaatgtagctattgcagtgatttcaatatctgggcacttgcctttaatagtctccagaagtgctataccttacagttaaatggccttcccaagcaggaccagtggattttcatgccagaggaaacttactagaagcatacaagacacacaaaaataagtgaaaacaaaaacccaatttctatgttaacttaagaggatgattttaaagtagttggaatatttctgttttggggagacacattggaaaagagaggatctagaaaatatgaaacataaactgtattctaagaaaggaagaggcagagagaggaaagaggagaggaagggagaaaatgaaagggggagaagagagataatttcaggagtaacaacttgcagatttctagctgtagcataggtcactactatattaaaaagcttcagctaagttcttgaagatggcttttgaagacctcatttttggaaatgaataggcagttcatgagttagaaaatctagaatctctttagtaataaagttatgaaaaaatttatgagattctagaaaggcaacatgctgctctttagacctgtgtccacaaattgattgggaataaagtgaactgacttctcctggaggagcaattatgagtgtgacagaaacccagcccataatctgggtcaagggaggtccctcatccacagaggctgaaaactgcagagtccacagccccatgctcaaagccctgtcctctggacaggctgatgaaagggtgtccataagagggcacaggatggctgctaggttctttgctggccaggagaaacatggtagacattgggtgaaggaggtccctgtggccactcaatacctgggatgggaggaactcactttgacagatggcgggtatattagtctgcttgggctgccattacaaagtaccacaaattgagtgacttagtaggaatgtgttgtcttacagtcctggaggctggaaggctgagatgaaggtattggcaggtgagtccttctgaggggtgtgaggaaagcatctgttctaggcctctttctaggatacttctccccagatggccatctccctaaatggtcctgaatggttttctccctgtgtctcttcacgttatcttccctctgtgtgggactgtctctgtgtctgtatttcccctttttatgtggacactagtcatacgaatgaaatgggcccactttcacttgcctgtctctataaaggctctatcaccaaataaggttatgttctgaggtgcagggggttagcactttaaaatacaaatctcatgggaggacaaaattcaactcatataacaggagacaggccatcgctaaaagttaaaaaaaaaatgcatactatagaatttcaattagatattgtttcctgactgcagttttccttgtatttaataaggaattctaacaaattttctcccaaggaatgttatatacccttgaccactggtatcgggagaaaacatcctggtattcagagagtactttgcagtttcattaattagttgtctaattaaaataacattgatttgcctctgcagatatggctgaatgtgttttattcatgtacttaagagaaacagatcattcatttcttattttaaggatgaaggtggctatttccatggccaaaaatcaccatgcaacctggcagggtcccctgccacctcccatttcctgccatctcatggtgaccagatgccatgccctttatgtctgttttctaaggaatcagacagcaaaatctcatagttcatcaaatgataatcatatattttctgttgtcaacaagtaaaagtaataaagttcatgctaaaaatacctgtattcatctttttaataaacattactgaaagtccattgccagtcaataattgaggaatagacattgttcctatcttccaggttcttccggtctggtaaattaagatggggtatcgtacaaagctagggtgtcctaaggtaacaacagactaatagctctggaggccagatatgtatgtatggttattaaaaagttttattagggccattgttgcaagtcatcttggaattgtttgccatttgagaacattcaattaaaaaggcattataatgctgagattttaaaatgtaaattagaatctggaaagttttcaatgatttctagtctaaaattaaataaagcaccaaaaaaacgaattaaatttagaacattttaagagaaatgaataaaaatactcaactacttttggaaacaaacgtagaggagagtcaactttattcaaccaataaatagaaaagcaatgctatttaattgatggaacaaaaaaaaaaacacttcctcagtttgaaattattcccagtttagaagccaaaccaagaaaaggagtgcttaaaataagtataaagaaaggaaaaacatacagaacggaacagagataaagcaaaaaaaaaaaaaaaaaaagattaaaaaaaagacaaattagagaagaagggtaaatgaagaagaaacacaccatagggacatgaaactaaatcgtaaagttaggaggttgttgatcactgatttatgaaaagctgactggttccatgaagatttaaaatagtgctctcaatattgtgttgcaggtgctatggttttattttgaaataagtatagtgtttgaaattccaaatttctcatttaatcctgaacattttgctattatgccaaagaatgacttgaagcacaaaaacgtatttaaaactatttccagcagtggttctcaaatctgatacctcagcatcacctggcaagggtttgctttgttatttcagcagagatttactaaccagctggcagtactctggatatttatgtttcagtatctctatttatctatttatattatcccagttcattctcacaatcacacaatgagcaaagcgaggcagtgctgaaaagggcagcatcagagtttgcccgcaaagtgttctgacagcaaaatgcatgctgagcttctacatttcattgtcccacaattgcaatggcaggcccccaccctagaactaccctctgggctggtgggattctgacatctacattttgaacagcatttcttaaaatcatcaaggttgaagattctaagtggtcaaatacactgcattccacaatgacctgagattaccttctttgtcccttgatttaaatcccaagtctttaaaaataaatcaaatcctggaatgagggtaggtgaaaaagttaatatcaaggaaaataatgaaaaagaaagaaggaactctgtgtataacacttccccaggaataagtagtctcaactacatcctaaagctctttaaccaccttcatgaaagcctcaatccacttggaatgggacagaaattgcaaaggaatactctctgggcaccagcaatattgccacaaccaaatcttaacatcataggatttcagcactgaaatggaaagtgaacaaagaaaggtaagcagtttacagtactagtaaggaagaaaagcaaaaggtttttcaaacattggggctctctccagttgttaccaagagatactgggatattttacctctaccatgtctgtgcctctaatcatccacccaccacagagctcagccaaccaagaagggctaagggtcctgtctaggactcttcacttgattttactttcttttctttcaagagtgcacaagccaggcacggcgcaatggctcatgtctataatcccagcactttggtaggccaaggcaggtggatcatctgaggtcaggaatttgagaccagcctggtcaacatggtgaaaccctgtctctcctaaaaatacaaaaattagccaggtatggtggcgggaacctgtaatcccagctactagggaggctgaagcaggagaattgcttgaacccgggaggcaggggttgtgtgagccaagatcgcagcattgcactccagcctgggcaacaggagtgaaactacatctcaaaaaaaaaaaaaaaaaaaaagaagtgcgcaatcctagtacacagaggaacctcaaatatcctctacttctagcgctctgaaaatacagaaacaccttgcaataaactcccccttttgcttccttttttcctactctcctatccacatcttccttgtccatatctgtttgtttgtttgttttcccttcaggaataaagggagttcatgaacagaaatctcacccaatcctatgataccttccagaggttagatgaagaaatgctgagtaaatatggagttcccttctgtatgctgttttgtcatttcttcgatctccagcaaagactttaaacagaaggaaaggagggagacagtggtgacatccaaaataaggttgaggccagacttcttcaaagtgatatgggaagggggcagggaagtgctgggtagggcctgtgccctcagaccaaagtgaggacaggcactcctgttttcatgcccaaatgttgcattttccaagaccaccctggctcacaatgtccccatcctctgcctataaaaaccccgagaacctagtgggcaaatacacaggcggctggacgtcaagcggaacacaccagcagaacacactgacaaatgctggcaggccatcagctgtggaacaccaagggaaatttggctgagggttgtcagaggagagccaagcctctgagccacccgactccagggcaaaaccaccttcccactccatcccccttctagctccccacccatctgttgagagctgcttacaccattcaataaaaccttgcactaatcctccaagcccacatgtgatctgatttttctggtacactaggacaagaaccctaagatacagaaagtcttttgtccttgtgataaggcagagggtctaattgagctgattaacacaagccagctgcagatagctaagctgaaagagttgactataacatatgcccactggggctttgggagctgtaaacactcaaccctagatgctgccatggggtccaagcccacactccccatgacctgctggtctgcatgctccctgctaggggtttgagctgtggggcacagaagaagcgagccacaccctattacatgccctgcgaggggcataaaggaactttcctcatttcaaaaatggcagagaaggaagggtgctcacacacatgtcttctagcatgttctcttttccccttatctcgcttttttccactaggctaggatttgattccagctagataaaggccagcccatggtttgtatctgatccactgttgaggcttcctacttctgagtgaaaaagcttccaaatctattaatagatatagccaactttcactcagctgccaaatcaaagaatgaacaaaggcaaaatagttaccatttagataggcttctgagacgcttgatttcatataagacatctgcatgcctaacttcccttttcattctatcaacgtctatctatggagtgcctactatatgctagggactgtttctgtgctacaggcatattcatcatgccattcatttgatttctaactgaaggccctttttcttctgcctcccaatttcagctgtcatcacctgtcaaaatcactatttgctctggtatttatggtgaaaggagtcattactagtcatcatgagaccatctgtacaatgtcactgggtagtgacatggcctctgttcagactctaagatgttccatcttgcaggatggatattaatgccactaaatccatcttcagcattcttgaatgagagcatttgcaatagctattacatctttgcaatagcatgaagacagaagacagcatattattatcaaagactgcacattacaatcaaattataatactacaagcagaaaatagattacctttcctctatttttaatgtactttataaacttggacagacaagccgtgtccagagggggttatggtggtcaggcatgtagcatgatttcacagggctatgaggatctcctgtgggctcctggctagatgttaaccttttaatttaagggagtaacttccaaaaatggtggtacatgagaaccacgaatgaggcagccttaggaggaatttaatcatctgtttttttatttaagtaattaattattttttggtttatttgtatgtcctaaaatgacccattgttcattctgttgcatattcagaagttagacaacactgatttaagcatttgcccagcatataaaaaccaactcaaattctgctggcttataaagtatttgaagtcagaggagatcatttcaagccactacatgatgtaggcagctcataaatataagtgaggtggttcagtggatttgtgatttgtttgatgattgatgcttcatattctaatccatcatcacagacatgatgtattttcttattaaacatgaaagaatatttgtcaagtgcacgagaatatagttttcagaaattttcttgaaacccaaagcttcttaattcatctcacattctctcacttatgatagagacattaaccaacacaacaaaataatagtgcaggcttgatgcgtagtcacaactgaaatttggctgtagagctgggagacaagaggggtggttagagttgtggggatgataagaagcatgtcccacatccgtggagcaactcttcttcagttccagccaactgtgagtgagaaaacccaggatcaccagactttcagaatttttaaaaaagaaatcacaaatccaaatttttgtgaatttttgattgttgaatattagcaactaatttatagttgaataaaatgcccgggggggcctgcacttgtgagatgaatgaacctatgtgggctggatttgacagaggacctgtgagtttatggtctattatttcaactggtaccattcaccagcccattagtgcagggaaggcaggatatgcatggggaggagaagggcactattgcaaagcggggagggaagtcataagggtaagccctgataaacacatttgctgactttgttaatttgattatttccagttaacaaaaagttacccttagttgtgataggatggttatcttcaaaaagttccttggaaaatgaggatttgagaaagaaatggtcttcacagcatcttgtgggctaggacttttctcgcagctgccaagagcctatagacagaaatttagatatttagaagatcacaagataaagttgttaaaagtagctgtttgatgtggaggaagcttctttgtcatttttttttttttacttatgcaagttttatctagtgagttctaaagaaaattccaattaaacatacatttacattaagaaaaagttgatactttcagtatctgttgtataattacctttttattaaatagatttgcaattccatgacattagccatggctttatacttcttgagcccctgacatcacatatttggactttggcatatattctgtcagggaatttgtcttgaatttttagaaaacatatatccaaagaacataataaagctatcagacattttcttattttgttttctgttttgatttgggattaaacagcagcaaagacaagaaaaacaccaacaacacatacagcaaagtaattactaaaagtgaggctggagctccagagagacacattgtcctgacaggtgtccgagggagacctggtgttccatgtaagtccctgatgtcttagagagactgtcatgagcacatgctcagacatcttgggcagggcatgttaggcagaggcagagacagatgtaacctaatgaagggtaagcttgagggtacttctcttgcctgacattttccaaagctctgttatcactcctggggagactgggaggaacccgctgctccagctatgctgctgtggcctaggagtccctcgtggcatcctcaggctgtgggtgtatccggagagctgcctgcactacttctaatatatctagtccccagggtcaaccttataaaccttagaaagttttccttttttttttttttttttttttttgaaacagagtctcactctgtcgcccaggctggagtgcagtggcgccatctcggctcactgcaagctctgtctccggggttcacgccattctccagcctcagcctcccgagtagctgggactacaggcgcccgccaccacatccagctaattttttgtatttttagtaaagacagggtttcaccgtgttagccaggatggtctctatctcctgacattgtgatccgcccgcctcggcctcccaaagtgttgggattacaggcgtgagccacagcccccggcccatagttttccttttaagaagaaggattggaacgaggatactgctctgccacaaactagaagacccctacaaccctggatccacagctgtttgcagccgatcctcatgcaaattgccaacagatacaggtgggaggtgaaccagggacatctggacaagaggcgcacaatctcaggcttgaagcactgctgaaatgaaatgacagagggtgttacagctgtggcgttgctcacaacaaatggcaatgttaaaaaaaaaaaacttttctgtgtcataaaaaataattcaagtatttttgatgtactatttctaaaagaaacaccaagttttacttccatttgttctacagaaaatcatgtggacaaaaccattgtcatgtgtagagatgatcaaagaccgactatgcaaccaaaaaatgtagaaaaagattatagatgaggatgatgataaaggtatattattgtcttgattttgtgacatcttgggttttgttaactatggaagtttttattctaagttaatatccatgtttatatctattattatattcctaatattgtgtttttaatgaggatctccaaattatacttttcaacaccacaaaacctaaatccacctctttaaagagggctgggacagagtcacgaaaaacatagaagctggtgttaccccgcaaatgctcagaaggcagtcaacattttgaggtgggggtttagaggtgttgtagacaggtaggctccagaacacttacaaatatgaatgcatcatacaaaagtcatcaaataagtttatttgaaagcattttgatttgcttttaggatggagtcctgagcatccttctgctattgtgactactctgacttgtttcctacctcatctcagcagtgtcttctactttcctttttttcacatgggtccttattgttgtatttgtatttatttattttttgcttttgttttgatttcttttttctaaatactaattttttaaaaaaatttgttcaagatgatatctatgtctagttatctctcaattcctttggcttacttttatataggccctcgagactggacttacaagcactgattatagtaaataacagatggcaaactattttggagagtgtgaacaataagatttctgcctctaggccactgacaaaaaaagatgaatacattgctatccccacccaagacagaaagaatttcccagccaaaacaggagcagatgtataaatcatgggcagagaaaataagaggggttttcctggacataatggagtagggactaatcacatactgtcatagcatttgtaacataaatgcatttcattgacgcagagctgtaaaaacaaaaggagttcttccataaatataagatgaagggtgttagttaactgcaatgacaaagaagattactaagttgcttatatgaaatgtgggagcttaaatgtgtgaaggatgaccctgtaaggtgccacacccacggctgaacgtatataaatggtcctgtccagatgtggcatgcaaactcagaatcttctcagtgtaactcagctgaactcacatctcccatcaacatgtcctacaactgctgctctggaaacttctcctcccgctcctgtggtggctacctgcactacccagcctcctcctgtggcttttcctaccccagcaaccaggtctacagcactgacctctgctctcccagcacgtgccagctgggttcctctctctataggggctgtcagcagacctgctgggagcccaccagctgccagacatcctatgtggagtccagcccctgccagacctcctgctaccgtcccagaacctccttgctctgcagtccctgccagacaacttactctgggtctctaggctttggatccagcagctgccgctccctgggctatggatcgaggagctgctactcagtgggctgtgggtccagtggcttcagatccctgggttatggaggctgtggcttcccttccctgggctatggcgttggattctgccgcccaacctacttggcttctaggagctgccagtcttcttgctacagaccaacttgtggatcaggcttctactattgatcatcttgttaaattgctgattttgttggctaatgccttcaatgcctctactcataacctttattgtcttcatcatgtacagaaagaattagcctcttattctataattatcaagttctcagtttgtctttgtccccaaatactggctggcaggcttcatctgaaaaactgtaattggagaactagctcaaaataaatcttgaaatacacattaaaagtagaatttatattattcgattttcttccacaattgtataaaaagtcaaatcattttaatccaataaatccattggtctcatattcagctatgtttgtggtggttttatattgctagggttttggttgtgatgtattaggcaattattatgaaacaattggtgtatatatataggaataggtttcaaaatcatatgaagtttgcgattcagacaaacttttgggggcctcagagatttttgttattcaaactacaggtagtggaagtctactaaatttacagacttttattcattaaaatatcagaatcaggaattagcttgatccccttataaaatgtggattcttgtgtctatgccaacaagcataaggtagcaaactagttgatagttatatcaggaatctgcagagaaaaaaatactatttagaacaatatggttatagatatacataaaagaaaaatggaattgaagagaaacaaaagtgatttgaagtaacttttgaagtcacccaatatttgttggtaatcatgatcaaatgcctgcatctcattgatgagaattcaatatgattcagttatctacatatgtgtaataagggataccatgaaacttgaatggaggattgatattccaccttggtttgtattcatgtttcacactaagtaaagctgaagataataaccttttgatatcatcagaagtgataatttaattcacatctgagcataaaattagggaaatgttatttctcttttttgtggtagcattctttgttttctcaggcaaagcagttccagaaacaggtgtgaagataaatagatttcaataaggaacctaaagttgagaagaaaaaaagagctcaaacaacgttcaataactattcccatgcattattcctttagacaacagctgttagagaaagagatccattatacatgtaaatgatgttaaatgtaaaaatatggagacacaaagatgataaggaatgtacagggaaacttattgtacgatatcttgaaggagctgcaaatttttgacttgcaaagacagaaatatcggaggggagaagtctgggaagattacacgcaataagcaaagcagaaggggctgaaagtctttgtgtattcaaggaattattggaaatttagctcagttacaatgcaaagtgatttaatatggtgtggtaatgacaaacatgttcattcaaactactaacacagtcttgagatagggcactttttttttttttttttttttttttttttgggacagagtcttgctctgtcacccaggctggagtgcagtggcgcaatctctgctcactgcaacctctgcctcctgggttcaagcgagtttcatgcttcagtctccctagtagccgggattacaggtgcccaccaccacgcctggctaatttttttgtacttttagtagagacggggttttgccatgttggccagagtggtctccaactcctgacctcaggtgatccgctcgcctcggcctcccaaagtgctgagattacaggcatgagccccacacccggccgagattgggcacttttattccattttctcttctattctaatcacttatgtacttttaaaaagaaatcttttatccaatgattaggtataaattattaggttcatacctaaggttaaataagttaaaatcaaatgcttacaaatgaaaaaacaatttataattaatgtcttttgtttagaaaatctagacaaggaaaatacatgtgaaaatattcagaaattatgagtgtcaacatctaagaaaggtcttgatatataaacatacatgtgaaaatatttagaaattaccagggccaaaatctaagaaaggtgttgataaataaacaagcagaaagccatggaattcatgactacttttagaataggaatgttgtcaaatccaaaagagaggctgaagttcagctccaaatcatttcagtgcttaagttaagaggatataggaataccagggttcttgttctatccttccaaaatcaaatttaaattcttccaggaggaggataacatcacagtgagctctaaattatttctttatatagataaatttagatacaaatgtaaatatagatacctatttatatatagatatagataccattgcagatatagttatatctagatacacatgaagacgcagatatagtctagtacccaacaaaaatttaccaggcttcagaagttaagaaattattaaatccaaaatatagatatatgtagcagaattaggcttacaagagcttcagtaaatgaaaatattagacataaatgttaaataactacacttgacatgcttagggaataaaaagatagatgaaaaattttggcagagtactgaagtatattaaaagaaccaaaaacagattttaaaattaaaaaatgtgataaattaaaatattgaattggtgaacggattaaaacaaaattaaacatggctaaagagataattagttattgttcactagaatatatacaaacaaaaaaaataaagaaaaattattaaaatatttaaaggagtttcagagactatggaacatgtgaaacagtctaacatagttgctgctagagtcctaaaacaaaattatgtgtctctctgtgtgtgtgtgtgtgtgtacatatggctagaaataagtccacatatcactaaatctaagagaagtcatatgtaataaaaacagattcacaggggatccaaagataatttttgaatagaggaaatatcaaatccatatattcaagaactactaaaaatcccatgcatgataaatatgaagacaagcccataactaggcatattggaatctcactgaggaacaggaaagaaaaagagaaaaacttaaagcagccagaggtgggaaaaaaatttaaaaagaaatttaccttcatcaaagcaactgggattaaaagctaaattttaaacagaaaagaaaaaatataagaaaacaaatacatgtcctcaaatattaaaaaaattcaaaagtagagtaatatgaccaataaatgtctgttttaaaaatggaagagaaatggaggatgtacaaaagcaccttttatgtttaggcaatgtttggacagttaatttacaataaacagagaataactagggctagacctttataatggttattcattactccatcattttgaaactcatcattttgagtgtttagtgacaataatcctaggtttcacctccacttattcattttactggaacaaatttatgattgataattctctttccaggttttctgcttattctaagtaattttgcatatataataaaataaacctttttacccatcactattatataccgaaatttaatatgatattatttagataatataacttttggcagcagcaaatcttggtagctcaaatcaaccctatcaataagatccctagtaaaactgaataaaacaatcctcatataaactctagagcacactcaggctaagaactgctggaacaaaattaggagatggtttaaatcaaaggaagtgttgacagttaagctgctttcttcccagaattgttcattgatttaaaaaaaaaaggatattaatgggctcatggcttgaatgaccacaagcaatcagactacaggaccttctaaggacctgggaacacacgtgaacatgctaagtttttggtaaggatcttaaatagtctatcagaatttttaagagcaagcatatatagaatatgtttcatagaaactgaagccaacctttgaactgcattgatcttggtgatatgggagtgttagtaacattatcccagcatgctatatccaaagtaaatttgtctgcaaataaaaccactcaaactctcaaattgcctatggtaattaattaaaaatgaccaattctataaaaaagcaagatatgaccaagccaagagacaatacagagtgcaaataaatccacaagagatgaaggtattagaatatacagaaaaacaattgtggttattattgttcttaaaaaatttaagacaaatttaagaattttgacagaataccattatctatataactaaacacaaaaatattaaaaatataaaatacaataattagaatgaacaaatctaaaacaattccaatggcaaactaaaatactaaacactctgaaactatagaccaacctccccactagatgaaatatagactataataaagagcactgatcagagagtggcaggatctggttgcagtttagacaaattggaagtggaatcaagctgattgaatttggtaacggtgcttgtttaactcaattaattgaggaattttactgagaagctctttacctttctaaaatgcacaaggaagggattatattctctggaaaatgataaaaatatttgcagatgtatatttgtgtgtatgtatgcatgcacacacaaatgtatgggtgtataaatagtaatatttatatgccacaagccacagcttttctatgcctataatgcaataaaacattacaagatacttgaaaaggcatgtaaatgttagccaaaggaaaacatttaatagaagaaaattcacatttaataaaaacactagaattaccaagcattgactgtaaaatgactatgatatttgaatgatttaagaaaatattaagataattgataaactttaagatatgaaaataataaaaagtaatccaatgaatatccccaaacagaaagataaaagttttaaataaaatgtatcggatagaatgaagaaaatatttgacaagacagtaacaaagataaataaacttgaaaataaattttttagaaaagattatctaagtacacaaagaaattgagaatgaaaaatgagacagagtaagttattaaagacttgctgaaaaacattaagcaatttaaaaattatgtaacagaagtcccagcagaagtgggccagaaaaaagcatagaaaagctattagtcaaaatgttgcgtttttgacaaaaataccacaacagcgagcaagcaacaacaacaaaaatcccttcaacccccagatccaaggatcttgggattttgaaatcagaataaagataaagaaattcagacttaggcatacaataattaattcatgaaaatgaaataaagagaagttcttaaaagtagccagaattttataaactacacattttttagagaaatagcaataagaattatagctaatttacagcataaatattgaaagttagaaaaaaatggaatgatagctttgaaaggctgaaaaagaaaaataatcaacctagaatttgatgacagttaaatatatccttcaaaaatgaaggaaaaaaacccataaattttaaatctgcacaaattattgataaaataagtaatttgaccaaggctgattggtaataaattgatcagcaatttttagaagaagtgggtaaagctgcaaaaataagttgtatagtctctggacagcacccctcagatctgaaataattcaatctacacatcagggatgcaaatccacaaaccagaaaatggcaagccaatattttcacaatgaaaagcacacaaattttgaaattttctattttcacaatgttgacaaataattcatcttttatgcttaaatgaaaaatcaaactacccctggatgcctacactgtacagaccttaccaatagaatcttggggctggattaaccaggatctggttgcatatcaagtctctattctcatacccccacatcattcacacaataatacaagtgtagaaatagagattagaataaaatgaaacagatgtgtctacaagcctctttgattggtgcagagaacatgaactagaattctataatttttcagaacaaattggttaactttctactcttagctaagagtagttttgctctctattcatcatgtggctaccctaatgttttgccatgaagactattttgaagaagtgtttcaaaaacagaaagaatggagaaggctaagacatttaaccttactgaaggaaatggaggagaaattaattctgctttggaatataaaaacaaaatttttttttcagataattatataaattttgtgcagttactgactccttttttctctatgcttcttttaaaattgaactacttgattttattgatcttcacaaaacctaaatttgactctgttgattttctgttttatgtttgacttctatttaattggcttctgttcttgccgtcataattttccacctttataatttcagacatttcttttggcttaaattgctatttttttttcctagcatcctcaaataaagtactgaaaatttgatttcaagctttttaatattctcattaaaatctaaaattttccttctaaacagttaaatctctcaaattttactgcattttatcatcagtatcatgtatttcaaaatattgtctaatttccattgtggtatttctttctttaacgtttgaattattacaaatggcattgattaatttacaattgtatgagattttttaagttaaacaccagaaattaatttgtcttacatctgcttatattttaccctttaaaaagtgtattgccagtgctcaactgaataatagctcacatttaaagtctgatgccagcacctgtgatagatttcattttaacaaattttcttttcaaaataaaatttgcatgatttaagggtaataaactttttaaccctggaataatgtggtggcttgttatctattcattttctaatgttattttcttgtgtatttgtgttattaaaattaaagatctatagttctctgtgaatgagctttgtatacaaagccttaaccgatatcctcagagtttttaactctcttaaagtaataatttcccagtagttcagaatttgacagtgaagcattctctgactaaacacctcaggagcagagaagagcttaattcactccatgaaccattgcccatgtgttgctgctaacaggaggagggaacaaagaagctgtacaagcaccaggaatacatagagcagggtgacacttcaggcttatatgacatggctcacattaagcaaaacaaacagagaactcatgtttgtaaaattgagaaaagattgcttatgagcttttttcgttttctttttctttttttttgagatggagttttgttcttgttgcgcaggctggagtgcaatggcgcgatctaagcttaccgcaacctctgcctactgggttcaagcgattctcctgccttagcctctcgtgtagctgggattacaggcgtgcaccaccacgccgggctaattttgtatttttagtagagatggggtttcaccacgttggccaggttggtttcaaatgcctgacctcaggtgatctgcccacctccgcctcccaaagtgcagggattacaggagtgagctactgtgcccagctgcctatgagcttttagtaaatatctttgaattcaccccattttgggtgcaaagttgcctgaatccctgcattcaccaactggcttccagactgatttatttctctgagtgtgtgtaagtagattataactgaacctatgggggaaaggatatagacgtggaagctgtgggttccatgttagtgctttcccatggctcaaactcagtgtagctggaaataaccttctgtagcagccaatatggctattttagttatatctcacaaacaaggatgctatttgattttcttttaatggttactttctaagttttcatgaatgtagtatttcacaaaataataagttgtcaaaaatatgactggttgtaaatgagctaaaattaaaagcaaaatgacacctttgtgtagagctgaccaatctttaaataaattttctatgcatcatctccttacaccctcaagcagacctgtgagagaattcactcatagtctaaggttcttttgcatatgagaaaatacagtctctaagagaatcatagacttgacaaaagtgccattcctttaaaaaatgagaatgtttcactctttctggtaagaaactgtgtagatcaccaaattaaatttaatgtattaaggtggcacttgagctctaaaagagtcagtatcttttttttttttttttttttggacagggtctcactctattgcccaggctggagtgcagtgatttgatcacagttccttgcagccttgaattctgggctcaggtgatcctcctacctcagcctcctgggtaaatgggacaataggcacatgccaccatgcctggtgatatggtttggctgtgtccccacccaaatctcatcttgaattgtagctcccataattcctacatgttgtgggacgggcccagtaggagataatcgaatcatgggggcagtttcccccctactgttctcgtggtagtaaatgagtctcatgagatctgacggttttataaggggaaacccctttcacttggttctcattctcttctgtctgccgccatgtaagatgtgccttttgccttccaccatgattgtgaggcctccccagccacatggaactgtgagtccattaaacctctttttctttataaattacccagtcttgggtatgtctttgtcagcagtatgaaaatgtattaatacaactggcaaattttctgtttatttatttttattatttatttttattttttatttttatttttttgtagagacagggttttgccatgttgcccagactggtctcaaactcctgggctaaaatgatccacctgccttgccctcctaaagtgctgggattacaggcgcgagccaagaggcagtttccaggtcatgcagcaagcagaggatggaaccctgcttcctaagtttcattttaatgcagtttcaattgtgtcctgtggtctcattttccctcccttcatcggccctctttcttattcttctcctccccattatcaccaccatcctcatcaccactagattgcttgggtaataatcatggttagtagacttttactgggaaatccaaagggattgaaataatgagtgaaaatatggaaggttctattcagttttctgtgacagaaattggaatgacaatgttcgatgctccctggtgaacttgatctaattttgtttataactttcataatttaaaaaatgttataattcaagttagctctatatatagaattctcatctgtgagtttctgccatcttagagatctagaacacagacacaaatagcattaacattaaagaatactttctggctaagccaaagccatcttggattaatggaaatgatatgcctattttagatataaaagtggttctctggcctctggaaatactctagttagaaaagcaaactaccttttaaagactaatatgatagtttcaataataattacacaactatatagtgaagcatgcttacacaactggtagttataatgttggagacaataaatttgcaatatcaaaactggtactaaagttaaatagattaatatctaatttcaggatgaaataacgataaatttatcatcatattataaactctatcattataaactttatcattctatctcaagaaactatcccaatgccatattaaagtttctctaaaaatggccagccgaaatccctgactcttttgcaacattttgaatttaccaggattaaggtagatttctccctatattccagcaactcagcaacagtgattccagatctccacttccctacgaaggcagtcctgctctctaccagatttctattagatctctcatgggctttgcctctaccagtggtgtgggtttccactgctgccttccctgtttgatctgttacattcattagctctgtgagtcttgaatctgggggttcaggtcttaagttcctgctgccctagcaactgtatttccagaaattaccatccatctagctactggccagcatgtggttctgacttccaggaattactgtattcagtttcccaggaagctcatcatgaatcatttatatgcaattgattttaccaatttttatttattcttgtcactttagtgattacagataacaactttgttcctcccaaccttaacttctgtatttttcattagtcatgcctcagtagcattttgtcacttttcaaaataagattcatctggctctgttcttagggaatgcatgatgaaaaaatattttattatatttttcaaggaaaatgcatccattcataggctaccatataatgagaaaattttaaaacaattttttaaaatacagttcgtttctctgaacttaccatttagcaggtttaatcgatgttaaccaaataattatttaattatagttgctattaaagctgtgaataagcagcctcaacatataagaacacttaacgaagagatgtcacctatttagaagtcagcaaaggttcccaaagaaagtatcctatcagctgagtctagagagtgagtaaaaatagcttgattggggtgagaaactggaataagcatatccaattagaaggtgctttgcactaatttgaatgaaaaggataaaaacctatgattagtgatatccagtcatcagactatctgtatgtactcattctacattgcaagttctgtctcacatttctacataaaccctcttttactgtacaccaactaaatttcacttcttccctaaatacaaaatatgcatttttttctctctgctttggtcattttactttaccttctcatatttcccttagctattctcatagttcttgtgattttgatattcaagatagctccaacttttagatatatgtttaaaagttcttctgaaattggagctaaactgaattagaatgaaatttaaagagtgaggtagtcaggatacgatggtatattgaatgtcgtgatcttgaacaggagaaattcaattaataaactgctgtatgtaaagaccccactttccgagctgagagagtttgaaaatggagttctcaggctcgctggggatggcagaggaggcgtgttgttgcagatgccttctaagttagctcaattaataatatcaatcatcttttacatgtctccctggtcagatatcacttgatactgtaaacaataggcacttaaaacaaaaaagatacatatttattgttataaacagaaacgaatgtagcacactacacactcatacatacacgtgcaaatcaactatactgcacattcccaaaacatttctagtcaacattgaactattggtcttataacgaaaaagcaaaaaataaaaataaaaataacaggaaataagtggtaaaacattctagtcacaggtgcgactgctcgcatcgaaaatcctaagtaatctataaaattactatagaaatattgattttatttgtctatacaaatgaaaagcatatgaaaaattaagtttaaaattaagttaaaatatattgtaataatatcaaaacatatcatttgtggaatagatcttgaatcgtatcatggatctatgaatttagggataatttttattatctcaaattcacagatccaaaacattccaaacaaaagtgccaaaattgccaaaaattgaaaaattgactgaaatttataaagtttaacagaggaagaataggcaacaccatctttaaaaggagaaataaaataggaagatgtatatcaaaatattatggtactggaattaaatatagataattaaattagtggaacaaaatagagttatgcaacagatccacatgtgtgctacctattttttacaaagatgtgaagtcaattcgaatgtaaaaacatgtcttttcaacagatggtattagagtcactgatatgtgtaaatatccaggcatctggagcaccctctctcctggattaagagtttagggcaccctttctacctttgcagagatcttgggactgaggagctttcacacctccatacctgacccgcctctgagtgtttggtgtctgccgacagaactctccctcaaggctgatgcttgtgcctgtcatcaggggacctgtcggcagaactgccaagtctggccctgcccatcttggccgctgctcccatggagctgagcagggaactcaaaccactgcgcactccacaaatcagcccattggctgagggaacagagagcttctcccagtaaacaaggatcaagttacgtacgtagccacgtcggctgcagctggctgtttcccatcagcgccatctactgacttgcaagtcaaaccacacagtccagtataaaacatgccaacagagtgcgtagggctatagaagcaaagccaaaaaccctacccagcattctctgcagtcgcaccccctaaggaagtaggaaggggaaagggagagaaaaacagagaaagaaagaaaaagaaaaaatactaccccacaaaaataattacaataattagaagtaccagtgcttccagacgagaagaaaccagaacaggaattctggcaccatgaaaaatctgtagtgacaccacgaaaggattacactagctctgcagcaatggtccttagccaaaatggaaactcagaattgatagataaagaattcaaagcatggatggcaaggaagctcaatgagatccaagacaaggttgaaaatcaacagaaagaaacttctaaagcgatccaggaaatgaagaaagagttaacatctgaagaaataattcagagcttcttgaaatgagaaactcacttagggaatttcaaagtacacttgaaagctttatcaatagactgggccaaacagaaagaataattttagagcttgaatattgaactctcctaggtagacaaaaatttaaaaaaatgattttttaaaaaaactgaagtctttgagaaatatgagattttgtaaagtgacaagtcctacaaattattagtattcctgagagaggagaaaaagtaaacaacctgaaaaacatatttgagggaataaattaatgaaattcccctaatgttgattgagagatagatattgagatataagaaatccagagaacacctgtgatttgcaatacaaaacgaatgtcaccaaggcatacagtcaccagactgtccaaggtcaatgctaaaaaaattttttaaaggcaactagagaaaaaagtcagattatgtacaaagggaactccatcaggctaacagtggacttttcagcagaaccttacaagccagaagagattaggggcctattttaagcattcttaaagacaaggaattccaatcaaggattttctatttagccaaactaagcttcataagcaaaggaggaatgaaatctcttccagacaagcaaacactaagggactttattaccgctagaacagccttacaagagagcttaaaggagttaaaaacctgctgccgcaaacacatatttaagtacatagcttacagaccctataatacaaccacagaatagaatatcaacaaagcagccagctaacaacttcgtgataagatagaaacttcacatatcaaaattaaccttgaatgtaaatggcctaatgtgtcaattgaatggcacaaagtggtaaattgaatttaaaaaagaatattcatttgctgtgtttaagagacccctcacacacactatgacacccataggctcaaagttaagggatggacaaagatctatctcacaaaaggaaaacaggaaaaagagcaggagttgctattgttatattggataaaacagactttaaatcaacaacagtaaaagaataaaaaagagcattacataatgatgaaggatttaatttaaaaagaaaacttaactatcttaaagatatatgcactcggccgggaatggtggctcacggctataatcccagcactttgggaggccaaggcaggtcagagtgagactcggtctcaaaaaaaaaaaaaaaaaagatatatgcactcaacattggagcacccagattcataaaacaagtacttccaggtctgcagaaagacatacagccacacaatgttagtggggagacttcaataccccactgacagcagtagacagataatcaaggcagaaaaccgatgaagaaattctagacttgaactcggcacttgactctaataaatatctacagaatagtctacccatctaccacagaatatacattcttctcctctgcacacagaacatgctccaagattgaccacatgctcaggcataaaataagtctcgataaatttaaaaaaaaaacaaacctcatttcatcatactctcagatcacagtgcaataaaaatggaaattaatatgaaaaatttccctcaaaaccacacaattgcattgcaattaagcagcctgaatgacttagcggttaaaaaatgaaatcaaggcaggatttaaaaattctttgaaatgaatgaaaactgagacacaacacaccaaaatcttttggatgcagcaaaagtggtgttaacaggagagtttgtagaacaaaatgcctacctcagaaagttagaaagatctcaaagatttggtatcacacccagagaaactagaaaaacaataacgagctaatcacaaatctagcagaagaaaagaaacaagcaaaatcaaagcacacatggaaaaaaattgagacctgaatatttatagagaatcaattaaacaaaaagtttgttcttggaaaggataaacaagatgattctaactagtgacctattgatccctagttagagtaacaaaaaatagaagagataagattcaaataaacatgatcagaaatgaaaaaggtgacattacaacgaatctcacagagacataaaagatcctcagagactattatgaatacctctattgaatcaggaagaaattgaaaccctggagagactaatattgagttctgaaattaaataagtaattaaaaaaactaccaaccaaaaaaaaaaaaaaaagcccagtaccagatggatttacagttgaattctaccagatgtacaatcaggagctggtacgaattctattgaaactattcccaaaaattgaggaggagggactcctccctaactcattctatgactccagcatcactctgatacaacacatggcaaaaacaaaattagaaaagacaattacaggctaatattcctaataaaataaacacaataaaaacttaacaaataattagcaaacagaatccaatagcatatcaaaaagttaatttatagtgatcaaataggcttcattcctggaatgtaatgttgtgtcaagatgtgtaaatcaataaatgtgatttaccacataaactaaattacaaacaaaaaccaagtaattatttcaacagacagaaagagctttcaataaaatccaatattcccttacgttaaaaaaccctcaaaaaaaactaggcatcaagggaacatacctcaaaatgataagagccatctatgacagacccacaggcaacatcacactgaatgagaaaaatctggaagcattctccttgagaactggaataagacaaggatgtccactctctcactactcctattcaacatagtactggaagtcctagctaatgcagtcaggagaaggaaagaaataaaacgaattcaaataggaaaataagttaaactgtatctctttgtggataatatgattccatacctagacaaccataaaaactctgccaaaaagctcctggatttcataaatgacttaaatcaagtttcacaacacaaaatcaatgtaaaaaattagtagcatttctatatataactattatttaagctaagagccaaatcaagaataaaataatatttacaatagtcacgtcaacaatcaaatacctgggaatacatctaaccaaagaggtgaaaggtctctagaaggcaaactgcaaaccactgctgaaagaaatcatagattatacaaacaaatgagaaaattttcatgctcatggatttgaagaatcaataccgttaaaatgtctatactgcctagagcaatctacagattcaatggtattcctatcgaactacaaatttaattcttcacagaatttttaaaaagtattctaaaattcatatggaaaaaaaaggatctcaaatagccaaggcaattctatgcaaaaagaacaaagccagaggcatcacattacctgacttcaaactgtcctataaggctacagcaacccaaacaggatggtactgatataaaaacagatacatagaccaatgacacagaataaagaacctagaaataaaactacacacctacagccagctgattttcaacaacttcagcaaaaataagcaatacagaaaacactccctattcaataaatgatgctgggatagctagttagcaatctgcagaaaaataaacctggacccctattttttactatatacaaaaattaacttaaaatgaattaaacatttaaatataagacctcaaactatgagaaatctgaaagaaaacctaggaaacaccattctggacatcagcttgggaaagaatttatgactaagtcctcaaaaacaattgcaacaaaaccagacattgatgtgggacctaattaaactaaagagcttctgcacagcaaaagaagcaatcaacagagtaaactgacaacctatggaataaaaaaaaattccacaaactatgcatctaacaaagatgtaatatccagaatgtgtaagaaacttaaacaattgaacaagcaaaaagcaaatcaccccactaagagacacttcacacacacacacaatacaagcagccaacaaaaatatggaacacatttcaaataaaaatcatcagaaaattgcaaattaaaaccacaatgagatgcattcaaaccagtcagaatggctactattaaaaagtcaaaaagcatcacatgctggcgaggctgtctagaaaagaaaaaacgtatgcactgttgatgagaatgtaaattacttcagccactataaaaaaataacaacttaaagcatagctacaatttgacccagcaatcccattgcaggacatatattcaaaagaaagtaagtcatttgaccaaaaaacaaacaaataaacaaacaaaaccacacatacactcgtatgctcatcaaagcaccattcacattcgcaaagacatggaattaacctaggtgtcggaggcatttgaaccaaccctcatggctgctctgcctacggaatagccattcttttattcctttactttcctaataaatttgctttcactctactctaaagacttactcggaattctttcttgtgtgacacccaagaatcctctcctggggtctggatcaggacctctttcctgtaacatctttctggtgaccacagaagtgcagaagtgactatagtgggaaacccatgacccaaagtgtaactttgggtaactggtagagtccagtaacatctttttggtgaaccacggaaggggcaatacttagaagactgcttgatccaaaggaaacagactgcagctctgatcagccaactttgggcaggtgttggggtacccaggtaaagaatgggattgggttagaggctcaagttaggggagttagagtctctcctaagacagattgggttagacgcccctcttaataaaaggcaaggacgcttgacagaccttgggttagaagcccaacttaggagggttagagtcccttttaaggaacctaagatttagggggttagaggcccctctcggtgaagtcccttttcgataagaactggtttggctctatgggatgttaaccactattctctttaaattaatctgccttgccctctttgctgatggccatgggtgaaagggttagccatgtacagatcattatgaatatggggagctttttcctccctcaaaaaggggaaacttgagagctgatgggactgctggaaaagatctgtttgccatcgacaagcagccacctaaaatttttagtgttgctgcaatgggtgggtcattctctgaccttcctgagtatctcaccttccccactctgactcaggcaatgctttcctccttctctctctccctctttttttattccctctctgaacaagcaggttgaatgaatggtaaaattcactgtttatctcctgtaaagttttgcttaatggaaaaaaggatttataaggctagtcttaagctgtagcaaagggtgtgctttgtgtgtctttctgtattattctgtcctaataaggtgtaccttaggatagaacatggatttaggacacccaggtgtgtttttcaagatggcccagcaaacttgtcagttagaaagtttgacacaggtccctgaaaaaactggatgagatttccttcttgtcttgtatgtccatctttgggagcttggccttgtaaccatgtggccatgctttctcttttcacaatggcagactgggcttaaggttcaattcctggcttagaaaatgagtcctttattttctgtctaagtattttttttttgagatggagtcttcctgtgtttcccagactggagtgcagtggcatgatctcggcccactgcaagctctgcctcccaggttcacaccattctcctgcctcagcctcctgagtagctgggactacaggtgcctgccaccatgcctgcctaatattttgtatttttagtagagatggggtttcactgtgttagccaggatggtctcaatctcctgacctcgtgatccgcccacctcagcctctcaaagtgctgggattacaggcatgagccaccacacccagccctaagtatttttatgtattatgtatgtgatgtttgtatatgaaaaagacttaactaattggtttaataacaataagagcttaaatcaaatattttgtcagaaaagttaaaagtgtaatgccttttggttcccatgacttaagtaatctttgagaaataaaaaacaattttaaagattattggcaaaataaaaatatcttcaaaaatgtaaacatctggtctaaatcatatacgtcagctatttagtttgctaaatgctttaaggttataaactgcttatttgtcttttaaaattgttcaattcattttgaagcattagattctagataaggcctgaggacatgtggaattagccgtgccccctagctatgcaaggaaggctataaagaaagcttttatataagaaaggatgttgtacggtaaattattgtcctaaagtaaaataactggttgtttaaaaagagggatgtttagggcaagtcagaaagtctaaacatgttgtacatggcctatgtaagtcctgaaaggattcgtgagagggaatttatgcacgaaatgttgtacatttaaaagtgattaggcctcctaaatgcttcataaaaggcatctgtgactcttaaatgtacaatttgcctggtttacagctaggtaaagcctgggacacatggagttagacactaggaagagtcaaaccttaactgcacttctgtctgctgtcctaggctccacgcctagtacataattaaaatcccgaatttaacaaagattttcatgaaaaggaaaagtttgtaagagtcaacagtgcaacatgtgtttgagactaccaaaaaaacccaattttacacacaagtcatgtcaggaaagtaggatgtacttttggtaaaagagtataagaagacatagaaatgtgaatttcttgcctatggttagagagttaagaattgttttaagctaaataggataaagatgaaggttttagcaagttgtggaaggtttgtgaaaatgaaaaattaattgtaaaagagattctgtgtgtgaacatattggctaaagttaaaggggcattactcagtttttccataaattaaacattggaataaaagcacagcaggttgttcctaaagcaaaagcctgcatataatctgctctttaacaaacattgtaaagaatttaaaaaggtttatgaggatcttaccttatggtcaaactgattacaactggatagatttatttatataaggttttataaagaattgggtttgacatcaataatgcgttaatgcaacagtgacatttggcttatttggtataaaaattatacgaaaagcattctcaaatgtgaaatggtgtttggctttctttgggctgtatttgcataaatgtttcattggtatatgttccaaaataatgggaaagccctataattctaatatgacttagtatatattattaataattataattgtcattgtatggcacagaggtaaccaaatttctctgtcaatcatgtttttgactgtggctgtcctaagacgttttgtcacctacagataattgttgtctcattttagtcctctttagaaggtggttttatagtcagctacagaactccaacaggtacacttgaatacagatttctgataactttagagactgtgacatcagaacagagaaaacaacttccagaagtctcatggagagctaaaatgttcatgaatatcaagcagaacagaaattaacttcatggaataaactgaagaagtctaaagtaatccgtttatctttttgcttaaaacattgctgattctttgttttgtttttcagaatgaaggaaatttttctttagagctatttacagcctttgacaattgagtagagtatactcctgtgaacaaaatttggagcatatttgtttctctctagctgatttctccagaatttggaaacacatatttgtgagtattcttaatttatggttatatggttatttgcataagttcagtaagaatctgttttcttttgcagcaggacaccattggagaaactggttattttaccacagctttgtctggaatggtgtgttttcctttaaggaatcaaacttgacttgtaaagcctataaaagcccctgggaacctggccttacaccttgtctaccatagtcccttatagggtttgtgacctgtggtaagtgaagaatgtcactctctaacaggtccaggagccccaagttatcttgggaccccaagaggagaggaatttactcaactcatagatatttgaaggtgcaaacccatgtctgggctgggctcttaaaaagtcttacctacgagtccttctatggagcagagttccatcaaagacaatttaaaaagagtttatgtaacaaaataattattctttctgccatttatacaaataatcaggccaagtataataaagccaataagtcttatcatgatttgtctttagtaaaaatgaaaaactggagagagaaatattatgtttccagaactatggtacagttgttattaaattctcatctcatcagttgtttataactttgtttctgcaatgtaggctaaccctacttattcttgcgtaccaaccagtgatctctaactgctgctcagaaaaaacaagaaggatgggtaatgtaaaaatctaaatcagttaattctgggcacattgcaaatagctagcaaccccacatcagcttggttccacctgttgcccagttcatgaaaagtcttctaatttagtttgtttgggataattttacttgttttgctttattcttgtggaatatattgctgttgtactcttggtataggaatgcagaataagcttactaaatgttttcttaaattgaacacttaattaatctcccagatatcaccttttgtcagaactcaagagttataaatgaccctcagcataccaactctttctaactgagctcctctctaccctgaacacaagagaccctaatggttaggcaggaatatcatcgcccgtattcagcctgaagatgttacagaagatggatcttcatccctcagcaacccttaggattaagagttttcttataaaagtgggggaaatagcagaggtgtttgaagcagagctactccatcttgaataggagctgggttaaataagggtgagatctactgggctgcatttccagatggttaaggcactctaagtctcaggatgagacaggaagttggcacaagatacaggttataaagaccttgctgataaaacaggttgcagtaaagatgccagctaaaacccagcaaaaccaaaatggagacgagagtgacctctggtcatactcactgctacattcccaccagcgccatgacagtttacggatgccatggaagcatcaggaagttaccctttatggtctaaaaaggggagacaggaataattcaccccttgtctagcatatactcaagaaattaccataaaaatgggcaaccagcagccctcggggctgctctgcctatggagtagccgttcttttattcctttgctttcctaataaacttgctttcactttaaagacttgtcctgaattctttcttgtgcaagatctaataactctctcttgcgtctggattgggacctctttcaggtgtccatcagcagtggattggataaagaaaatatggtacgtatacacgatgaaatacttagagccataaaaaagaacaaaatcaagttctttgcaacatcaggaatgcagctggaggctatcatcctaagtgaatttaaagcaggaacaaaaaaaacaaataccatatcttgttacttacaagtgggagttaaacatttggtacttatgggcatgcagatggctacaataaacaatgggaacttctagagtggggagagaagaaaggggcaaggattaaaaactggttgggtactatactcagtacctaagtgatgggatcaattgtaccccaaccctcagcatcatgcaatatacccatgttatcaacctgcacatgtgtcacttgaatctaagataaaagttgattttttattttcaaaaaagaaggcgaacaatacataggaaattaccaatactaataactactttgggaatacgtaaaaaaattcaactttagtatcaataaaaatataacaataatgagggaaaaataaacactaaacaaaagattccatgggtatggccaataaacataaaaaaggtgtataaaaatcactagtcaccaaataaatgcaacttaaaaccacagtgagatgccacttagcaaatggctgaaagaaatatggcaaatgttggtgacgatggagttcgtaggcgtctaggaaattgctggtgggatagtaaaataatgaaactaactttggaaaactgtttggcaatttctaatttagttgagcatatgccgactctatggtccagaaatttcattcatggttttcttccccccgagaaaaaactaaaaacatatgttcacaaaaagaaactggaacaatcaatattcattgtgctctattttttaaatcttgagaaaatttgatgtcagtcaatagatgaaagaatacacacattgtgatattattaacaaaagggaatatacggcaccaataaaatgaataaaacatatcaccacatgaagcttttcgaaaacattaagttgagtgaaaaaagatgcatatgataaaaaaaatgtatgatttcatttttatgaagttctagaagaagcaagttaatgtatggtgatagcaatcactacagtagctgtgtctggggtcaggaattgatttaagaaaggaacatgagtgaattttctggagtgaagaaattttctgtattttgatcaggtagtcattacacaggtgtgtatattcatcaaagacaacaagctctaccctttgaaatatgtgcatttcatggtatgtaaatattgattgaataaaaaatattatttaaaaacagaggtattcttatagatatacctctgcttaaaaatatttaatggcttcttgttggttttagaagaatgtctgcaacaccaaattacaactctaaggacctgcctagaatggctccaaaatacctctgtggcctaatttcaaactcttctttccttttctcttaatgaccagccaaaatggcttttagtcatgccatacacatctcaaaacttttttttttttttttttttgagacggagtctcgctctgtcgcccaggctggagtgcagtggcgcgatctcggctcactgcaagctccgcctcccgggttcacgccattctcctgcctcagcctcccgagtagctgggactacaggcgcccgccaccacgcccggctaatttttttgtatttttagtagagacggggtttcaccgtgttagccaggatggtctcgatctcctgacctcgtgatccgcccgcctcggcctcccaaagtgctgggattacaggcgtgagccaccgcgcccggcccacatctcaaaacttttgtcctagaaacacttctggtaccacttactgattccatacttattgtttcaatctcttttaaatgttagtcctctgagaaacatttcctgacttctaagactaagtaaagttcccttgatgtatattattttagcaaaaaaccagctcattatttttgtaattaaacaattgtttaatatttacttcatctgttagactttcagcccagctagaacagagaccacgcgttttcttaattcatttattatggagtaatgaatgaatataatcttatttttaaaaatatattcagcaatatatttccacagcaaagattctggttcatggtaaaggctgaataaatatattgtgaaaaagggtggtactgacaaaacatttgacgatgtattctgagacatgactaataaaaaacagtcaaacaaacatggggtcagggtgttgaggaggacaaagctgctctctgtagccactcatgaggtatgcattaatgaatagaaattgttgaaatcaaatgcctagaaatgatttgtgagagaatttcctggaaaactggttacattaagtcttggaaatcagaactgcaaaccagttggtaggcagatgaccagtagcttctaagattataattgcatgggcagtagttgcttgggaactaaactcctgggttcaaaatgcatagcgcaagcatctgtcaaagtatgcagcaggagggagctggaagaatggaggcaactagatgtagtccaaataagtgccagccgatttcctgttaatcatgtagaatgggatcaacttggtgacaatcagaagactgtaattcactatgctatatgcagttgctgaaatagagaataaaagctgcattctgggaaatttagagtgttgctagagatttggaatgggagagggtggatgtttcctaactggtaatgacatgatataaactcaggagttacaagtctctcgtgataaaataataaaactttcttgttttgactatcagctagaaatggtacctttatataataaccggggcaattgtggtataagttcagagtccccatcattgagttttgatcatttgtttgtgagcactctattatactgctatctatctgtgatcaatctatctttgagttattttctaaatttgcatgtttactagttttggtaggcagaataatggctcctaaaagatgttcaaattctaaattctggaatttgtaaatatgttccttcacatggcaaagaagaattaaagttacagatgaaattaagcttgctaaaacagggtgagtatcttggattacccagccgaacccaatgtaattgtaagtatgaagtgggaggtaaaggcagaaaagtaggtctaagcgatccactatgaaaatgattggactcaccactgctgtctttggagacagaggaatgggaccatgaaccaaaaaatgtaggtggcctctagaacatccatctccaaactttttggtaccagggtcaggtttcctgaaagagtttttccacagattggagcaggtggggagggatggtttggggatgattcaagcacattccatttattgtgcactttatttctattattattacattgtaatatatcatgaaataacaatacaactcaccagaatgtagaactggtgggagacctgggctcgtttttctgcaaatagatggtcccatcttcagatgatggaagacagatcatcaggcattagattctcataaggaatgcgcaaccaagatctctcgcatgtgcagttcacaacagggtttgtgctctgatgagaatctaatgctactgctgatctgacaggaggtggagctcaggcagtaacaattgctcaactgccactcacctcctgctgggctgcctggttcctaacatgccatggaccagtaccagttcatggcccggaggttggggacaccttctctagaatctgtaaaaagcaaggaaatagattctcccttagagcctctggaaagaaactcagccctgctaatactttgatttagcccagtgaggtcatcaattcatcagattttgacctacagaattaaaagataataaatttgtattgcttaaaactctaagtttaatctaatttgctatggcagtaataggaaaccaagattaaagtgtattcctgaaagccagaaaaccattcctgcatctgcaatttggagacagtaacagaggaaacctcagcctggccaataagctataggtgctcctcattaaacccttaccattgcctatgttttggggatataaggcttgatcattactcttgagtaaatattatgagcatgggactaactagaatcactaaaattcaaaaaatccatgaagttataaaaaggaccaagtttatagaggatttcacagtttgtcattttaatttttgtaactcaatcactgataatttttcctatgcattttctttcattattccttatttctttcctctaactatataagcaccatgactatttcctaaacatgatggaggagaaggaggagggagaagaagaagaagaggaaaatagggagcaaatgacggaagtgaggagataagagaaaatgtcacagctggatagatccaataaaataaattgggtggaataaagtagttctactcacagctctacaatagcttgctgagtaacattttaaaattctatctaacgctactgtttccatttccacctctgtagaataagaatattgaagtcgatgaactctacagctctctttatatttcatattttatcacattcgcagtaaaagaggaagagaacatgatgagatgactgttatgtacttataagactaagttttttgtgaagtgtctaataatctgcattatatttctaatttcagagaatgttagaagatcttataaaataaagaataggaaaatacttgaacattgcttgttttatataaatattatgtctgccattaccatcgtattgtcttagtaccttactttttataacacttggatgtaagagagcagaacagcataagtacagtctatccaattttatttcaagatacgacaaaaaacaatcatttttgatgatagtaaaggcttcagagttttcaattagattcagtttatattttggcaaagaacccaggtacaactaacacctgctgagcctacttccttcccatcaaagtttgttgcctgcctttttaaacaaatggagatcatttgagcagattgaaaacagtaattggggttcagggatttagctaattaaaaataagtgatactcctgcactatgatacctgaagctcataggtgctcttttctaaacatttacatccatgtgttagtcttccattttaatatacttcatgaacaggcctaatcatataagtatgaattttgttcatgtactcttcaaacttttctgttacattctgtccttagagatgcatggcatattcaaggaatgaacaaggatagtcaatgctcttaatactatcagtaacttactttttataacgctttgatgtgagagaacagaacagtataaatacagcctatccaattttatttcaagatacaacccaaacaatcatttttgatgattctgatgaaaggttatcatcaaaaatgatagcaaaggctatcttaactatcctgacgaggatacttaagagaaaggctatccttggaaactgtgagaatcccagaaactcctgcttaaagaggaggaaaatatctaaagcccaaccaaaattagtgtggagatcccacaatctgggcattgcaaagcccattaccagaagcaatgacaatgcacatcctagacaatgctttactaataaatagcaatattaacagcacatttggacagaagaataaagagtttattaaaataaaatctttttcacttcctatctcttttggaaagaaatacaaaaactataaattatatctataatgcagtttggatcactcattgatccaatggcttcagatatctgaattataaaatccatgccttcccttcccagagttatagatccagattgatccagttatagattattcattgatccaaactgcagtttgacagaactaacatacaacccagtttttgagggctggaaagtaaggaagacctggtgatcaataatattagaatacttctcaaaggaagaaattaacagatgaccttactaaagaatatgcatttctcaaatgagttttaccagtcaccacattagtcagtagaaaccagatctacagaatggctgataacaagatgaatggaaccaccttctaggtggaaaatagattggatggcagaatctggatctataactctgggaaggggaggtatggattctataattcagatatctgaagccattggatccacagcccagtgaggagcagctcctggatccacagctcagggagcagcagctattggatccaaaaccccgagacccaacatgcatagtcaggcaagaattgcagagcatgtgagtcctggggtagtagcaggaggtgtggcaggggctggactcaacacacaatgtctgacagctgttgggcctccagcaggtctcctgacagcccctatagagagaggaacccagctggcaggtgctgggagagcagaggtcagtgctgtagaccaggttgctggggtaggaagagccacaggaggagcctgggtagtgcaagtaacccccgtgggagcaggaggagaagtttctagagcaacagttgtaggacatgttgacgggaagatgtgagttcagctgagtgtacctgggaagattctgagttttaacgtggcatcctggacagtgtcatttatatcctctcagcaataggtgtggtgcacagcagagtcatccctcacatttttgtgctccctcatttacatatgtgtagctcagcaatcttgcctgtaattgcatttgaatacttttccacatgttgtatttatgcgtgctataattttggtgttatagcacaaagccaatgaactgcacttatgccagaaatgctatgactgtttcgtattaatatttattttattatgtctaggaaagcacctccttttcctcctagcataattttcatgtgtcttgttattggctgttatgggcaataattttccctaaacagtgagaaatgagataaagttacatgtcttttttgtcaatggattagagacacaactttggccttaatgagaaacctgctgaaaactaaacctacatgtcaccatcctttctcattccacaaaagtttccttcatctattatgtactgttactcactgtgtctcacatccagtgtagagggaaaagtatgagccaagacaaattgaataacattgatgcctatgaccagaaggaaacctggacaattatttggagacatggtgacagcaagggatggaactgagacaatcacaaatgaaaaacaattctggggccttatgaagagaattaaagtgttaaataaacacacaccattgaaatgacagaaaaaaataaatgaattttagattcaatgcatctaatatgaggcccatggtcctaagagattctcattcatatgtgtggcagcctggagaattctcatctcggatcttaaattacaggaggcttaaataaccagtggtcctacctgctgtgttctaaaagttaacactgcatttttggggaaggcttgctttctctgggctgctcccaagcaaagactgagcacagtgggatataggaattcctggaagacaattgacggccagctttgactcagggtttcctcaacggccttaaagaactactgtctcctgcataggtctcaagcacttctttctctttctccttcacttgggccagacctatgtccaaatcttacaactctcccagcctctctcaggggagactctggaaagagaaaaaatgcagaaaatctgtaaatatttaatcttgtttatactttttaaaaagtgatactgtttggatttgtgtccctgcccaaatctcaggccaaattgtaatccccagtgttggggaaggcctggtgggagatgattggatcatgggggtggatttcccccttgctgttctcgtgctagtgagttagctctcatgagatctggttgtttaaaaatgtgtagcacttcccccttcactctttctactgcttcccttgtaggactgcctgcttctccttcattttctgccatgattgtaagttccctgaagcctccccagccgtgcttcgtgtacagcctgcagaactgtgagtcaattaaacctcttctctttataaattacccagtcacaggtagtagtttatagcagtgtgagaatagactaatacaaaaagtaaaccaattttttgaaggatagcaaaaaatttaaactgaacattttatcttgagtatgccaatcagggtaaacaaaaaaaaaattatttcagttgttcaatgatttagagaaacaataaacaaacttttgagtttagttttggagcttatgttcagactgtctccaggtaatatctgctaaaactcattttttcagccatctccaccttagttagactagatctacaccattctcctattatttcacgtgtgagttgatgtcttttatcaagattggtaaattcccaactgtactctcttcaaatattgcttctgccccatcctctcatctttcttttgcttagattccaattataagcaaggtacactttttaactacattacatatggcttatactcttttttctattttcaatctttatatagaagtattggcttttgcttattgaggttgtaacctggatggttagtgaaagcaagattttccagcatgttagtgacaagttgcctggttattttgaaaagagaagcaggtaggtgccaaacgttgtaattttcaactatggatgagattctgttgaaaacatatctcaaatatccaaagccattattcatagcccagtgaagagaatcatctgtcaaaagatcagaagccttttgatgtatatccctgagccatatattttatgtgaaagatctcaatttttaattgttgataaataattcagtcaaaaaaagaaacaacaatgatgaggctccatattaaacagaacaaataatatgatctccaagatgaagtgagtccaaagttgtggcatttacaagttcttcttaaacttctatcaaattaatgtggacaaagttttagagatttagaggcagagagaagggaagaacacctcttttcacaataactggttcagagaaggatttttgaataaggagcctggattaactgaagacaaattcactaaatcccttagttttgcctgaataaattcatgctctccatttaactcataagttttgtattcaagattattttaaagagttacatttgaaacaaaagaaaatggggaaggaatagtttccaaacctacttactaaggtacaaggttaggggaaatcaactgccattgaaaaatagaaagtaactcactgaatagatatttgaattggccatatttgcttctttcttcattcttccttctggaaggcctatattaagttacttttcaatattgccatacattttaattgagaaaatttaatcgagaaaatgtctaacattattgttgtaagtttattatattttattataaaataaaatgtcatcaaccatgacagtacactttctttggtcctgaatataatttaactacttgtatttcaacatagaatattttgtgaatgaacttacaaagtggctatcctcaaagaatacgacaaagctgtccaatttttatttttcaacatggaatctataattcagcagaggcaaacaaacacatgaacaaaacataaaatataacaagtaaaaaaaagaaaaaagataaaatcaaacttaagcacagaaaaaagaaagaaaaatagagggaaagaaagtcagaggaagagagagagaaaataagagagaaacattcatataccatgcagaggaaaagaggactggggaacaaagaaacttcacattttcacaggaaaatgtaggatggtacctggttctacaagtggcaaaaagacactgaaagccagtaatatggaaagctagagccattctaagaaggtagaagtcctgtataattacaaaagtagatgataaatatatcaaagttcataagatttgctaattttgaaaatttttgctcataaagacattgagacaagacacatgacagctggaatgcaataggaaaaaaaattctgaaattcctgagctttctctttgtttctctttcacttgtttcctcccttcagcagacaagcattcgggctctttggctgaagagacatgacctcaaattgatcttctctgtgactgtgtttcaatcgagcttctttttgttatctcgtctttaaataaatggcaaggtttctttcaatttctagccatttctttctatctctttgctttgcctgttcttgatctttcttcactggatatgagacagactttataactgtagtacttaatgtattaatttactcttaccgccctaaaaaatcaccacaaagtaattttggagtatagcaatcaatggtgacaagatggatcattttcacaaaggttctcatccaggtggaaattgcaccagaaagaaactaacgttatctcattccccactcttaagaggaaaacatctactagcaaagccagatgtgaatacacaggaaaagaggcagttagcatgtgccaaagaaataggaagagctttccttgtcatgatgagctagacattaatataaaacagtcatagcatttctgacataagtacagttcattggctttgtgctataacacgaaaattatagcacccataaatacaatacatggaaaactattcaaatgcaattacagacaagattacgcagttacacatatgtaaatgagggatcacaaatatgtaaaggatgaccctgttgggcaccacacctattgctgagaggatataaatgcccttgtccaggatgcgacattaaaactcagaatcttcttaggtacactcagctgaactcccatctctcatcagcatgtcctacaactgctgctctagaaacttctcctcccgctcctttgggggctacctgtactacccaggctcctaccccagcagcctggtctacagcactgccctctgctctcccagcacctgccagctgcgttcctctctctacagggactgtcagaagacctgctgggagcccgccagctgccagaaatcctgctaccgccccaggacctccatcctctgctgtccctgtcagacgacttgctctggatctctaggctttcggtccagcagctgtcgctcccagggctatggatctaggtgctgctactcgctgggaaatggatccagtggcttcagattcctgaaatatggaggctgtggttttccttccctgagttacggatccagattctgctacccaaactacttggcttctggagcctggcagtcttcttgttacagaccaatctgtggatctcgcttctatcaattcacctgctaaatttctagatccttttgagtattgggatcaaagtctctactgaatgcagccattattttcattcttgccagatcccaatatctttttattcttccaccaccagcttcttgcatgaccaacttctggcagactgcgaaattaatgagtaacctaatattaacttctaatatctttaccattgatcgaatatatgctatctgattttcatccaaaaactgttgaaaatggaaattttaatctaataaatgtatgtaatctggtacccaaatatattgttcacattgttattattttattattattattttgcttacatttttgcattcaagaatttgggagatttaagtaaaaatcaatatgactgtgtaactggatttggggcccatataatctgacagatctgagaacatttctcttgaaattaggtatgttgtctattaagagtaatcatttctggaagaacatagtttgcatctgcagacttgtctcaacagcagtgagaattgtctaagaatgaaggacatgcatttctactgatataggaaagcagaaaatttgatgcataaactagaaatgcagacaacaagactaggatgtaatttataaggtaaactgtatgcttgcactaaaggttacttaaagtctagtatctgaatgtggattttcaaccaagagaaaagtgaagcttaagcactgctaggacagacgctttgctctttgttagtagacttaagtgccaggtttcctgcctcccactggtaaggagagtcaggatcattcaccaatgatcttaagtgggaattattgggtccaggaggcttcggtaacctaccgatgcttcttcaaggctcaaccttaatcaagctgacagcaacacacctgagccatgctgaacaagcatttatatccattagtcttactctggatcctcctcttctccccagaacaaggctaatgtcaaagatttgggtgcaaacagtttatgtggcacaagatcccaggaagcaagtatgagacactatggaagatgaaagaatcaaagaggaaaatctaaagaaagggtgcattttcgagtttattttatggagagcaacttggctaaatcttgtaaggaccttttaggagcatgtagaatgactcttggaattgtcccccacaggatcagatcaacatggaaaaacatttatccatccgcttctttctcccattggctgaacaatatccaagatgtgtaattttcaggaaccttataattatgcaaggaaagaatcacagtgggcaccttctgttttcctagttgtgacctggaagaaacccaggtacagtaaaagtggcgttgcatatgactgagggcagatgttgtccacacaaaggtggttgaagccaacataaaatggtttgcattgctatgcttgtggtcataggtgagtgtataccacacaagaaggcaaaagagttatcaggtaacagattttcccttaatacttaacatccctgtgagaaagacaaatactgtatactatagacctttacaggcatgggggaatggaaactctaaaaggatttaaaactggccaaggcttacagatcaaagacctggtagaatatgatctcttgaatgaatcttgttttgttactcttttctggtttttcttttctttttattaaaaaatacaactcctagttcaaccaaggaacacttagtatttctagtagtacagaaatactgcagaattactattcatctaaatggagatgatccactattggatttatttgtgtagcctcatgagtagtatcagtaataaagaatgaaaatacaaataaatttagagtttaggagaagagctccaaagaaggtaaactaatttatttaaataacattttaacggttataacaaatagtagagtaatagaaaaataatcaatggcatctcaggaagaaaatgttatgaattctgagttctatgacatatcttaacattttaattattatcatgagtgtaacttagttttttcagatttaggatccaagatgatagatataaagttctgccttcaataataccaagcattatgaacaagaatggtgaaattgcagactcttgcaacatctcactaataacgtaaatcagattcccattttggtgagattggactgaagggggatggaatcaatcagagtgaattcatggcaatgttcttgagtaaactaataatatagaatgcagaagcagcatacaatgtgtaaaaaatattgataaacataaggaaattcctttcatttacttttctgtataaaacaatacaaattattgcttaaaataaatgaaacaagagctcaaagataatacagtagaaaaacgtgaacatggtgattaacaaggtaaggaaaagtattgattgccagtacaatttagagtatatacaaagtgttttaaaatttttcaaattatatcttctacttttattgatagaatattgcagcttattcggatacaaagtgagttatgtattcaccacaattaaaaatgtgcgtcttctccacaggactcttattttctttaccatgatgtccttaccaaaatttgtactttttatcattatggatacaacagataatctcatcttcaatgttgaacttttaaaataactttacattagctttatcaaacagaacattatgaactttttatagctttactcttttgggggggctaggcgaagaaatcaaaacattattggaattaatttattttctgtttgaagcatttgacagttctaatataaaactgaattcatttaatccctagtgatttgtttttcctgctactggaggggcatgtcattaactattggttcaattattttctgtacatgcacaagaatatgtataatttaacacgagtgaaaatgacttaaaacagttatttgacctaaatgaaaatgtctgtatcagggtgatgtattgacacactttttgcaactgttaatagtaaataatcatcttaggacttggtcttcttaaacatttttctgtcttttgaagtagatactgatgtatcttcagtaaaactatgtctttcacttttcatgtggtcaatgatatcacctactctcatgttgaataataaatatcatcaaattgttgtacaagttcatgcagtcaccatcaaccggatttagtggtagaaattcagaacccaacttttgtttttttcattaaaaaatgagcttttatttttggcttattttccttttcttctatctacaaaatttaaagaagaaaagtgttaccgaataataaaaaatagttgtagatttaaaaaatacaagacatggccaaatcactgtagcaagagcatttagattatcctttatctgtggctttgtggcagtcaaaatttcatgcccatacttcacgtgcacctagccagcaattctcaaatttcccactaactccacctactgttggcttgagagtattgccgcgtcttgcagctgtggaatgggccatcgcactaccggctaggtctgaacaacaaatgacccacccccaagacttgaacgagtaggctgacctatcacttgtatgtaagtgtaatttgtttctcaaatgctctgtctgcatgttctctttgcaagaaaagttatagtttttagcggggtgtggtggtgtgtgcttctagtcctagctacttgggaggctgaggtgggaggatagtttgagcctgggaggtgaaggttgcagtgaacggagattgtgccactgcaatccagcctgaaccatagcaccgcaagttatctcaacaacaacaacaaaaaaaagatagttctattttgtttagaaattttaagaacaattgtaagcattctgtcttctttcagatttaacaattgaagtaaaaactctgctcactgtgcgtgctactttttcttcactagatgaaaccatgacaaaagtaaagtagaaatttcctaaactaatcattatttatgttaatatattactgattataaataaataaaaagttaaaaatctgagacaatcaccaaatggtattggatactgaaacaacaacaacaaaaaataaaccatgccatattgttacccagtaggtaagtatctaggtcttccatttaataatgttgtacttgacttaaatgataaaacatttgaggcttaactgctgattcaaggattatcagctacctggatatttagcctaatcctgtaacaagagaatatttgcactggttttgaattttattttttcaagaaagtgctgccaaccaaacaacttaaaaaataagagtaagttgagacttcatcaagtttatagaactgattatataaaacaggttggtcctacttgctaacgaatattgaaatatgttagcactttcatttggagaattgatttcttacctggcactaaggctaggggatctggattcctcaacaaatctaactcactaaaatctaactttttactggatatcctcactctgaattctcatatatttcagaaaacattttataaaagtattctttctaccaaaattatgtgatacaatcaatttaatagtcattgcaaatgtaatcatttatataaaaatattgatgtttctaactccctgcagaaaaagaagaccacagtggttagtttgtttgtagtcttaaaaatgtgtcctcttcattttatcacgtgaagatattaatagatggaatcaatatgaaagatgaaaagtcttctaaattaaaaaagaatatggacaattttactttttaaaattaaaaataaattaaacttttattttagggttaaaggtacatgtgaagatttgttacataggtgaactcgtgtcacggggattttgttgtacagattatatcatcacccaggtattaagcccagtacccagtagttatcttttctgtttctcttcttcttctcgccctcctccctcaagtagatcccagtgtctgttgtttccttctgtgtgttcatgtgttcgcatcatttagctccctcttgtaatttacaacatgcactatttggttttctgtttctatgttagtttgccaaggagaatagcctctagctccatccatgttcccacaaaagatacgatcttgttctttttttatggctacatagtatttcatggtatatatgtaccacattttctttattcaatctgtcattgatggccatttatcttgattccacatcttcgctattctgaatcatgctacaatgaacattcgtgcgcaagtgtctttagtagaaaacacagaaaaacctagccagatatttagtagtttttaagacaaaaagtaagcaaagaatattaaagcagatatgcacatgtaatgttacccagttttatttaaacttacgttcttcactttgtaaaatttaaagcaactactctaggggaaataactaggagatacagtaagagaagtgtgctttgatattgcatatctatataattataaataagcagttttgacatcttgctccagtgaatattttctagttactggaattcagattattcctcatctatcatgggtaacagtagaaatcaaattcgtaggcaaatgataggataggagagcaatagacggtatggatatatggatatggacacagtaggtattgtgtttaagtttctggttcctcaaacataattactaaaagtcatattcacaggctggatggtaagaagcagactggcagctactagaagaatagaaggttgggtggtaaaagttgggtctataatttagggatgtgaaagcaatgggacaataacccatggattggaatacactggatacaaagcccagggatggagagccacagccaaaagattgaaagcccctggatccaaagcccagagatccagagtaagtcatctggcagggcctgcagagtatagaggttctggggcaatagcaggagatctggcaggtgctggacactacacaggatgtctggcacctgcggagctcccagcaggtctcctgacagcccctgtagagagaagagcccagctggcaggtgctgggagagcagaggtcagtgctgtagaccagtttgctggggtaggaagagccacaagagaagcctgggtagcgcagttatgccccacagggcgggaggagaagtttccagagtagcagttgtaggagagagttgacttacaatgacaaggttgtgactttgaatgtcacttcttggacctggggacttatatgcccttaacattgggtgtgtcatccacatggcacataaaataggttacctgccaactttaaatgaattaaaaagataatcatagtcagacatatgtatttattgtgattttacagctaggaagtgcagtaatgtttgtgccttgggattcagttaatagtgttgactctttaaagctattactcatcttcccttaccaaaggtcactcttcagataactcagagaatcgctttagaggtagacagtgtctgggctgagggaagctgccttaattaaaaataattgatacccatttcacaatctgtctcaaaattgttgccatctggtgcacaaagttgccagctaaccaatctattcatagtcatttctttcaaacaaaaacatacattcactgtcaccgcaaagtagcaagctaacttaacgaagaatgtcatcagaaagcagcaatggtgatatgcaagatataatgtctttttaaaaatcaaacttcaactggaacagctttaatgaaatattaactgagattcccttattttctgtgctcctgtttaaaactgtatgcagactattaggagccaatcttagcttttctttccttgggtgtgtgtttactgttgagtgaattaaaaataataaattgctttatgtattttggaatggtcgagattattcatctaagatgcttaaaaggcattaaaaataaaaacagatcatgtgtcaaagatgcctagtgtatttctacctctaatcagagtcagtgtttcccactaaaagaattccccagaatctggaaaagattcctgttttaaagaaagtttataaagtaactgctttgagatggtgagacaaaggcagcatcttaggaagattcttcctttgcctcaaaaataacatacatgactttgacgtaaattattttcaggtgtttctgacaggtattacaacacttctaaaataatggtcatattttctcttgttctgtgacttgtatttcaccttgatgtaatggtgtaatgagactgatatcttgaggaagaggagagattgagatttatcttgctgtggtttctgtgttgtttgatttgctcatttttagaaaaaagtttccattccacttctgaatgaaagtagttgaatgcaaaaaaatccatactttgagaaaagaatgtgcgacattacttaatatctgatccctcagagtattcttctactgaaattgcttatataggaatggatgacattaaaacaagaaagcaacttcaatttaggcgggctaaatatttgtgtggctattttgatattcaatattttattgacaaacacaacaggaagatttggaatctactagaatgctttttggctattaataattgagaagcctaataaataagaattgtttattccagaaacacagaacaaactatgttacttaataaatgaaacatgattggagatcaatttgtctcctcaaaagtttagacttataaagtctacaatttggaaggaagttgagcaattatctccagcctcctgtcagattggaattccacttacaacatcctaattagattttcccagggccctcagtatggaaatatcattaattgcaagagcaactcattttagatttttagctgaatcttcccctaaaacttttacctagtaatcctgattcttcatagaagggagtctcagttcacttccattgtagaatacatcagttctgaagatggatgtcttaagaggtttgcccattcccacaggttaaggcatttcctgcatccgtgccatatatctatttacagtttgctctgatgaactttctgagcgaatccagaaaaatcctcattactctagtactctaggcagaatatatatgtcagctgatacatcagaggtcacaaaggcattcactctcaattacacattatcatcatgtatccttcccacccctttatttcaatttataaagtcatttgttactatgaattctttacatattttatctttctgtgaatactacatgggatagacatttccctcatttcttgcttttcttttccctctctggtaaaaatgtcaccctctgagagaaaagaaaggaaaagattaacgatttacattttacttatagtgcttattattttcctctcagtaacatcaacatgaccaaaaattacttataccttatggggataaacggttttttataatcaaacttattgatgacttctatgaagaagcaaatcaacctttgagtaagggatttctttagtagttttacaatgtaaacttcaaagcacttgttcaaaaatttcacccttcattcttaactcttcatgtgcacaagagtgacttagctacttgtgttataagaaatctaaacttaaatatgttaggcactcatttagcatgtctaccaaataaggattgttattgggttatttcttctaatggttcaaagaattgaaagaaggaatagatattgaaattttttttctgttctcaattgaatttataaaattggagcaagatcaaagtcccttccagattacaaggtatttttcagatctttacaaataccagaactctcagtgtcttagccgtttgatccaatttctagaaggacaggatgaatgaagcatcaagtttttttctttgtttttttgtttctttgtttgtttgtttgttttggagatggaatcttgctctgtctcccaggctggagtgcagtggtacgatctcggctcactgcaaactccgcctcccgggttcaagcaattctcctgcctcagcctcctgagtagctgggattacagccgcccaccaccatgcccggctaatttttgtatttttagtagagacggagtttcaccatgttggtcaggctggtctggaactcctgacctcgtgatatgcctgcctcagcctcccaaagtgctggaattacaagtgtgagcctccgcgcccgaccctttgaagcatcagtcttataggtacaattatggtggttttcattctacctaagcaagatgaatgagaaatggcatttttgtttcatgaacaattgctttgaaaaactaatgaaattctttcatgtagaagtctacgttcataaataaaattctttgagtgttaatatatttcattttgactgcagcctaattaagtgttctcattagaatgggcacttgtgactacacctattgctagagtatgtcagtgtccagtatagaaggtaacattcacacacacacgctcctcactgcaaatcacctgagctcagaactcctgttaacatgtcttacaactgcagctctggaaacttctcctcctgctgttttggaagttacctgaggtatccagtttccacttataatttgttctaccccagcaatgccatctattctccaaatacctgccaactgggctcctctctctacaatggctgtcaggagacctactgtgagcccaccagctgccagacatcctgcactttggccagatcctatcagacatcctgttactgcccaaagaattccatcttctgcagtccccgccagactaactacataagatcccttggatgtggaaacactggccttggatctcttggttgtggaagcactggcttccaatctctggactgtgggtccagcttctaccacccaactaccttttcatccaggaatttccaggcaacttgttactaaccagcctttgggtctcgcctttttggatcatcttactgaatattctccattctctcatgattatttctgtactctatggaactgcaacactcagcctgtccaatatctgtgattgttgaccatctacatcagtaggactcagcatcctagccctcttggaagtatatgattgaacacggacaaattaatcttgacctaggacccttcctaaatctgacaggagatatatcttgaatttcaatttttgtgccaatgctcaggatcatttctgttatcatctttctaaaatccttctctcattattttcccagaactcttccactcaaatatatttcaaatagttacaatattttaaataagcttatttctttggcatgaattctggcattccattttattttgttaatacaatacacttaggctgggcatgatggctcacacctgtaatcccagcactttgggagactgaggctggcggatcactttaggtcaagagtttgaggccatcctggccaacacagtgaaaacccatttctactaaaaatacaaaaattagcaaggcctggtgtgcacctataatcccagctactcaggaggctgaggcaggcgaatcacttgaatctgagagacggaggttgtagtcagctgagatcatgccactacactccagcctgggcaacaaagtgggactctgtgtcaaaaaataaataaataaataagtaaaaatgatacatttagtgaattcatcccatatcttcaactgtcttccttaggtacactttttgtttgtttcatatgttttattgatattttgttgaatagaaaacaaagtgcaaagaaaatttaaatatataacctatcacatgttttaagagatttaaatcccctcataagtgcattttttatatatttgcttcagaaaattttgttttagtctttcattgaaaaaaaatttattgaggtcctattatataccaagcattacgctgaacaaagacacaaattctctgcttcaggaagttcccacaaatacaattataacttatatggcaaatggaataatggggtgaagacaagattcagtgggaacacaaagaagaacttcaaaaacactcagagaaaataatataaacccattattgaaaatagagtaaataagttacacttaattttagaataacaaatcttactgatctattgtgtccattgcagtcccttgaaaagcagctgccaaatgggattaaacataaaaaagatttattggtgaaaatgccagtgatagataatggggaggtagttggagaggtctgggagagccatactactgtggagtatgtctagcctcagtgaaggacagagggaactaagtttggtctagaagaaacttctttaagaaactccccatcgggcgtggtggctcatgcctgtgatcccagcgctttgggaggccgaggcgggtggatcgcgaggtcaggagatcgagaccaccctggctaacacggtgaaaccccgtctctactaaaaatacaaaaaattagccgggcctggtggcgggtgcctgtagtcccagctactcgggaggctgaggcaggagaatggcgtgaacccgggaggcagagcttgcagtgagccaagacagtgccactgcactccggcctgggcgacagagcgagactccgtctcaaaaaaaaaaaaagaaaagaaaagaaaagataagaaaaaaaaagaaactcctttagggcaattctaagaaagttttggcaagtcacccatcaaaggagccttacatatcaccaaaatgggcctgccttagcatccttgccaagagtatttactaacaagaatggatgacagcacaaccttggcacagaagtgatggtagattcaaagaccaactgctgtagctgtcaatcagtcagtaatgctccctgaagcagaagatttaagaggtacatttgcatagcttccatcttcatgatatttattctgatcctaagtaagctcagcactgataaacagtggtaaaataataaataataacttggaatttttcatgtttttcttactttgatcaaaatgtcaattattatgtcagaccctatagaggacccactgaatgaaaatctaaccctactactgagtaagagaaaatcaagaattattagatggttatctttgattttaattgatgcattaagcagacaggactcaggacacaattaggaaactgcttcatttttttttaacaccactgaacttcacacttgaatttagagctctagcttccctgaatccctgaacaacacaatgggtagatctatgatcacattaagatattaagaaaaattttcatttcacgttagtaatccaaagttgcataattacaaaaccagtcttacagccacaataaaagcttctccctttcccctcagtttaggcctgtcatgtgtttccaaaggccaccagtggtttaaagaagattttttttttttttaaatttccatactccaccttgccttccatcaatgtactgctccttgtttccctttgattcaaacatacacaatgggaggaaagaaaatgacaaccagggccatcttcctcaacatgatgctttaggccacctgtgtcaacatggactttgttgtttgcctctgaaaacttttactgggaagagataataacaaccaatagctcatttcactgcatgcttcaggaaattcctatagattaatttgttggagccaatagcccaaagacctgaataaacagttccctaattaagcaacagtttatgtatcaagaaactcatgtcagcttcctctctgaaagacccaccttgaaccagctcagcccagaatctcatttctaacacctccctgtggaaacacagacaagacttacagtagcattcttctttgtggcagggagctcaaatatacttcatttcgtcttagcagattttctggtgatcttacaggtttttcaatagggacattaaggtttgtgcatttagctaggacccaatctttgccattgaatatcctctgttattatgcactctgaactgagcatgtaatgtttgtgcccttcctccaaattcatatgttaaaatcctaattcccaatgcaatggtatttggagaagaggcctttgggaggtaattagcttatgaaaatggaaccttcatgtggaaactagtgcctttataagaaaagacacaagaggtttgcttctggtctctgtgctctctgctacgtgaggacacagagagaaggtggtcatctgcaaaccaggaggagaaccatctctaaaaaccaaatcggacagtactttgatcttgtacttcccagcctccagaactgtgaaaaataaatttctcttgtttgagtctcccagtatatggtatcttagtctgaactgactaagacaccacaggtgtctgaatattggttcttttcctagtggagactttggtgtgttttctagaaaccatcttattcccaccccagcccattctccctggaatccctgaactgaatattgcctgacagagttagcacacccttccatgacttctccctgtatcctcatcccgagttccctcctgctagggctccatcccagccagctttcttctgctagaatccatttgtcctggaggtggccctcttggcccataggaaacacacactcacagcactgcccatggaagtgtgatttggtcctagagcaggtgtcttccacccagctaattctaatggctcactgctttaagagtatgctagtatagtctcaaaactccaggagatacagaaatactcaattttctgccttgtcttcttggtgggcaaacaattccagagacatgtcattttcttttattagtgtgacacttttagtaaatgcatcctgtacttattactattttcattaggtaagcttgttttcttagctttatgtgtttcttcttctttttttttttctggaaagaaaatggagttgagagaggagttgaaacatgacatttcatgtcttgagagatttatatcccatcatagagcatttgatcatataattgctttagaaaatgttattttcagttagggattcattgaacaaacatttgttgagttcctataatataaaacattcttattatagagaatgagactaccttctgtcattctagccagccaccacactgtctatgaatgggcctcatcaccttctctcccttcccaaagagagggaagccagggatatatgtatttctctttgtgtgtcacatgggtagtattatcccacaagaataaaacttatttcagagtaaacctcgttcttttatgaatgtctaaattgcactcaaggggtataaggctcaggaaagctgtaaagctgtcaaggccatctctaatcatgggaatgtgactaggactgggatttattgtcatttaccaatatttgccctcagctttggggactctaccaaatttgtgacttatgtgaaaagcacctgtaaaattattttacataaagataaaagaaagctcattatataagctcaataatgagaaagtgacatgagtaactacactcctatatgaaataccctggatattcacaaataaagaatcatggtgaatataaccatactgtcacagaataaatgattttctacagagcttttcttctagatcaggagttgaaaaatgatggctggtgggccaaatccagctactacctgtttctatatatgaaattgatcggaacacagccacaagcatccatttacatatggtctattctgactttcatgctacagtggaagagttgagtggttcagacagagaccatatgtcccttaaggccttaaatattcaccatctagcccctttcagaaaaaaataaaaaagtttaccaacctttgctttaacatgatggaacttgcttcaaaattgttaccataatgctccaatttctggtaactataataaaggaacatcagttaattcttctcacttcttttctttggcttcatctacactttgtagcatcaactggagcctcaacatcagaataaatggctactgtgttcttttaaaatttgaagtgaacaaacatcaacaaaatgtttcacagattctcaaagtttttccatttgactgagagtgttgagttttgtgatgaataaacagaactccttctaggtttcacaaattataataatatgaataatatccagtatttattattatatagcaagtgcacagtgtgaatcatttaatctccaatcaatgctgtaaggcaagttctagtataacctccattttacagatgaagaaattgcagcacaggcaggttaaatatactttccagcaaaacaatgcggccaagtgatggaggctgcaaccacatttggtttacctctggaacatgtgctcataactaggagattgtcttattaactttttatatttctctgacatgataaatggctagttaatgaattagggaggaaattgatgaacagattttgccattctgtacttacagagcactgaagctcatagccacattgtcaaatgtttatctcagtctttccctaaagggatgtctcctatttacactccagtctgtgaaggatcctttgcttttctgactggtgtcatctacaacatgttattttgtccagaaacttgcctcatacctttagctttggctcaagggaagatactcatagcctaagatgcagaagaaaatatctgactacctgagttccagattccctctgttttgccatttctgaaggaccattaagtcagctgtctgtgtttcaatgaaaaagcaactcttttcaattatgtagaaagatgaagagagaatagaatattgaattggcagcctagagacaacttctagagctgaatccatcattccctatgtaaacttgggcaaattatcttatctccttgagcctcagtttccttatttgttaagtgagaatgttgtattgattaatttttaaggtatctgttgtttaactttaaaattagaaatagaattcacatttttaaaagtatgacttggtagttaaagaaaactaaaataatcaggcacagaaatgattttaatagattttttgacattatgaaggtaatacacttgtccctatatacgtaaagcaatttattgcaaatatattttgtgtatttatttttatctatgtataaatactttcaggattttccagtgatcttgttaggtcatagaagttgttcaccaccacagccttctttctctcactttcttagcctatgggccctctactcagggttcccccagcactttcagagtttgatgaaatactacacctggatggagtatggagtctgacttcctgagtgcttccccaaaacatgcttcaaccggaaatgtggttgaattacccttacagtgaacctgatcagtggtaacaggagatgctagaacaggaaaagacaagtttcccctttcctccctatcccatcaattactttgaggtgtattttttctttgcaacccctccagagaagtcggcaatgtttaacgagcatgcctgccaagtggcttgccttatacctcattatgaagtgatactcagggccactaacacatcgcacagcattgcattgcattttgcttgctgcacttccatgctccattgctacagccttgcacttcccaaacagggttagtccttaatgatcacctcaggttctgcattagtcaggttctccagagaaacaaaatcagtatgatctctctggaataatgagtgagaaagagagatggagagagagagagagaatatgaggaattggaggctgggaattcccacagtctgcatttgtaagttgaagacccaggagagctgttggtataattccagtctgagtccaagggactgaaaatctgggaaggtgatagtataaatcccagtataagagcaggaaaatacttatgtgtcagctcaagtggccaggcaaaaagaaaaaggggcaaattcctccttcctctgccgtttgttctattatggccctcgatagttgggatgaagcttatccaggttggaaaaggcagtctactgaatccattgatttaaatgctaatctcatccagaaacactgtcacagatacatccagaaatgttttaccagatacctgggcatcctctgattcagtcaagttgacacaaaatattaactatcacaatcattctaactaaaactacagttcgtgtataattctgttgatatgtgtgttatttatattacatcctccaggacctagcataaaccgtggcacatggcaggtccaaataaacacttatttaaatgaatttgcttttttgtacttgaaatataaactctttgagtaggtgattttcaccatgaaatatttggtagaaacagctgaagaggttcatagtaaaatgttcatataatgaactaaattgaaatgttgggacgaagggtaaagcctgtgatatcagctacaaagcttcagaatgaagaaacacagttcacagtccattttaccactgctggtagatactaaaaaagctgagttctctgttgtagagcacatagaatgagtcatacaaattgaagaaagatcttggaaggcccaagagataataaaacagaacctatattctagcaattgttcttgattatttgaaatatagtgaagagacaatctaattcttaccattatctcttagtctatgatgatcatgagtgggtgtgatctcaagagacaacgtaagcattttagaagcttgtcacaataatgtcatcatttttctctaattacaattgaacaggtcattataaggtaaacacaatcaaagctattatgtccatatgctatagcagaaaaatacttgctaagtgggtagctcgccattattttagatttaggaagtataaatatgctgattcagcggtcatccataacactttattcattcatggagtaatataatattgcatccatattgtgctatccacattccaaatggggtctagcatccacagttcagaactatcccacacagttcatttctaaaatacccatctaaagcagtggttctatacaaaaaataattttgcccccaggagacacagggcaatgtctggtgacatttttggttgtcatgaactggtggctgctactggcatctaatgggaagaggcccagggatgttgctaagcatcttacaatactcaggatggtgcaaacctagcgaagaagtatgctacccaactgtcaataatgccaagatttatggaaattgcaaaaagagcaaatactttgttaaagtgcaggaagcaaagcagaaaggtagagaatgataaaagaagatttttttaaaaagagtaacaaagaaataaaacaaacatgaggaatgtgatggccagaaataacataagatggtaaactagatttaaacaatttttggaaacaaattctctgaacattgccttctgctctaatgtgcttcttgtgcacagttgggctagtgttgccttcttagcagagctacactggggagtgtggaggactcattagcagaaaagtcatgactgtgaatatgcacagacattttaatgaaagctttagttactacagtgacaactctctctctctctctctctctctctctctctctctctctctctctctgtccactaagagattctattgattctgtttctctggagaactttgactaatacactgatataatcttacgagaaaagcaataaagattggaggacttttcccagaaaagataagtcttgacttaggacctaaaggatcatagatttagatgacagcgtaagatcacagaaaaggaacatcacaggtaaaacttacaaagcagtattcaagcagaggtgaggattctgatgcacagagtgcatgagaacaacagctggagcttgaactagaaaggttactggtcacaagataccatactaacaaacttatataatattacataagaaacaggagatcactggaaatttctaactaatcatttcagaatttccatctgtcatctaaatgtaatttactatttgggcagattttaaaatgagctcttttatttgactgttttaggcaatattttatttgagataatatttgcaattcactttgttcatgttgtattatctgaaatccttctggctaagaaaatattagaaatattttttagtttgaaagctatatcctactttctgaatttttccaacttgcctggaaggagcccttaaacaaggattgtatcttctacataatttgttacctacagagtagagtatcatttagtaaaaagttagcaagtgatttattcttctttcaaggaaatgcagtacttttgatataaattatttattaagtgtagaaaactggctttatatcttgtcctgatccacataacatcaacttagtattctccagtgtttccgatgtgtatgtcattgtaagcacataggtcatgcttactatatactttttgatagaaagaggaaaccttgtgcagatgaaagaatcctcttagaagagatgaatgttccatcccagaagcagaggtgtttcttattgacagtttcaggtatctttgtgtataaagggataaaagatatttcaaagaatgtatcacctctactaccaacttatattgctaggctttgattgttctatggaaacaagatcacaacattaagaaaccattattgtagacaaaaataaaatttaattatgaaaattggagtcatttgccttttcacttttaggctattttcaaaagcggtagtcaaaatgtcgtgggcttttaaaaaacaatatacatgctgtagcaatatattttaataatccataaaacaacacaaagagatgtgttgggtatttgatttgtttatatacataatatgacatctgaggtaaaataaagtttatttgtccaaaatcaaacagcaagccagtagtgtcttgtcaactcacgtccgtttttaaaactccctctatatattttgggctatatcacccttatgcaagaggtaaaaataaatacaaataaaagaacattcatcctcatcagagtaaactgtccctatctcctgggtaataaagtacctgttttcctcagtcaaactttctaagctttttaaatcaaagaaatattgagcattactttttcaaagatcttgctaacatagtattcaggtgttagggatctgtctattgacagtgaattacatttctacaagttttttttacatagcctggtaagaggcaggatgaatgttgaaaaatattcttagaggagctaacggcacccacgatgaagtatctaaggatatttactggagccagtggagcacaaatggaagaacggtgatatgaaagaaatagtgtggagagttgaacaacgttcatgtaattgaagagaggctcaacttaaattttggcacctctacataaaaacaaaagtgattcctgcagaactaagtatagagcaggctttcttgcatatgacacaatgcactctcaatagccatttagccgctacattttcacaaccaccaggcagagatttctagctattttgatattgacttaagtaattggattttacataacgttagaagaaacacaaggaaaaccagcataaagttaaggatatggaacattttaattttgctcctttatatgtcatgctcagaatattctgcatattgaaagagagtaatgaaattctgtaatgatacattctaaattgttaaagatcatagtaccaggccgatatgaggctcgggtcatcgattggaaatccattttatttctttaaatatcattctttatatcccaattttgtacaaattctattgtgaagacttagaatgtatttagtttgtccattgcccccatcctgcaaagatacactctatttcaatgggtgcacacaactatatatgttttaattctgtgatgtatataaccattttatttatcgaatttcattaacatcagctctgttaaaaattaaaatatgttcccactcaaaatacattttatgaaaccattaagactaagtataaacaaataaacaaacaaacaaaaaacagaagaaaaagatgtacttattgagagacaagaatgtttagtatcctctgaggtgaattatgaaagggtgacttaaaatcccttctctcagtttctacacattcttcttaagaaacctacttaatttttttttcgcttgtaaactgagttatcaggaatgatttttctgacatatgagctcatgaccttcaatgacctcaatttttttcatttttacaattgaataaaatcatctatttggcagaattactgtaagtattaaagaagataaatatgtatataaatatataatatataatatatatttaatacataatatatattatatattatatataaaatatataaatatatatttataaatatattatattaattattttatataattatattaatatttataaatatataatctttatatatatttatcttctttaatacttagatataatatatacatataatggaaggcctacaaaaatgttagggcattctcactattattttcagtcattttaatttatatgtcctaaaacataaaaattcattctgtcaatagtcaatatttatggaatatcatcttatggtagttactgtgctggctttgggtttaaaaagatgaaaagacgaccgggcacagtggctcacgcctgtaatcccagcacttcgggaggtagaggcaggtggatcaccaggtcaggagttcgaggacagcctggacaataaggtgaaaccctgtctctactaaaaacagaaaaattagccaggcatggtgcaggcacctgtagtcccagctactcgggaggctgaggcaggagaatcgcttgagcccaggaggcggaggttacagtgagccgagatcgcgccactgcactcccgcccaggcaatagagagagagagagaaaaaaaaaaaaaggatgaaaagatatagttcttaccctcaaaaaccttacatgacagtttaaaaaatagagtagtagaaagaaagatgatcctcacatgcttaagtgttttagaataggctttctctagctctagaagaaaattctttccaagtgctgtaaaattaaaatggacgctttgcatgggaatgttgttactttcccttctatgtgagctttcaaaactgtatccacgaccagctctacttgaagaatatgcacaccctctccgacactccgctttgttattagaacaacgggtgccagtgcagtttctataaagcagaagctttcaaatttatgtgaccaggactcacactgaaaaatacttttacttcagaacttctctcatctttctcagaaagcccaaacattcgatgactctaataatttctattttatctcataccatcccatttcagtccattctattctgttatttctcactaaaagaaatactgatcaccatcaacaaatagattttgtgaccaatagtacaagtttcacattttgaagacatttgaggtagagattacccacatgggagttactaaggtggctaattccacgtgctgtttgaccttatcacacaaaaaattcattcctttattaaaaactccactctctttctcagtaagtggaacaaaggtcccattaaaccgtggttcaactattaggtcactagatgctcacagaagaaatcttaagtacctacacattttttatcagataaaattgcaaactgtggactgaaagataattgaagacaaaattagagtctgccctaaaggagattaattgaaattaggaaaatacattgatgcaagtttaaatcaatgttttaaaaaataacacatcatatatcaacttacattttgggatccagaaagaatatcaatcaagtagatattcgagtttgaattcttcctatgaccttaacaaagcttaatctttatatagtgctttacagtcaattttttaaaaaatttatttcctttttttgacacagtctcactctatcactcaagtttatggcacaattacaactcactgaggcctcaaactcctgggctcaaccaatcctcctacttcagcctcctgagtagctgagacaacagtcctgtgccaccacccccagctagtatttttcttttcaatttaattttttgttgttgttgagatggagtctcactatgttgcctagttggtctcaaacttctgggctcaagtgatcctcctgcttcagactcccaaagtgctgggattagagatatccatcacagttctttacagtttatacagttatttcattcgcacaaattatcttatgaatgctatctattatgtcataaaaatagttactctttttgcaaagatattgaattatgacatttttcatatgtcataattagggaattatgacatatattccctaccaagtagggaactggtaagttactaatatttagaagtgaaaaatgtccctaagtgtaccaacgcattggatgaaaagttccttaaatatagcagttggttctagatccttatgaatcaatacagtagcaagatgatcagcttttccacacaatgagatgtcacaaactagatcatgactcaaagatgaaaattcaggagattttctgcccagagcatgaaatttaccatggctggaactgtaaatctgatgtaacgtctgtggcaagaatgggagagggagaaaaatcttggctggctctactgggactgaacacagcactggtagacagtggccttgcagaaagaattgtggcagtcattgtggaattgggaactacctcaaaaggtactaggaagagaatagaggaagtggcttggacaggaagactgaaggagagatgctgaggccaagggagcctcaaggacttagataaagtttccagaataacaaccatcaagccaggtattggaaaatatggttttggtgaattctcctttagaaagtggtctggggtcaggtgaggtggctcatgcctgtaatcccagcactttgggaggccgaaatgggaggatcacttgaggccacgagttcaagaaaaacctaggccacatagtgagatcctgtctctataaaaaacattaaagattaactgggagtagtggtgcacacctgtagtttcagctactcaggaggctgaggtaggaggactgcttgagcctgggaggttgaaggcgcagtgagccacgattgcacaactgcattccagcctgggtgacagagtgagaccccatcccctccctcacccccaaaaggaaagaaaatcgtctgagacaaaatatataatcccattcttatcctgtatgtcttataagtggatgtacatctacacaaaatgatttgagtgaatctatcacattgaccaaattactggcagtgatatgtcacatgcattaatatttagttaacttttccgggagttggtgataaggaatatccacttatatgttatgaaacttatacaatgtttcatttttagacaataaattttattttatcaaaagaatgactcaacataattttattaactcccaaaacattgaaataaaatatgtaccagggttaagcgtcttgtgcaaccaaaagaaaatgtatgcctaaaaagtacttcttcaaaaattctctaatatgattttatcactataaattaattgccactcaccttttctgaaaatcttttaaaaatattacgtgttgtattagtccatttgcattgccataaatacctgagactgggtaatttacaaagaaaagaggtttacttaggctcatcattctgcaggctgcacaagcataacagcaacatctgctcagcttctggtgagggaatcagggagctgacaatcatggcaaaaggcgaagtgggagcaggcattgcacatggcaggaaaatgagcatgagagaagggaggaagaaagtgagaagaggaaataccagactcctttaaacaacctcacctgaactcattactatggaaagacaacaaaccattcataagggatcctcccccatgacctcaacacctcccaccaggccccacctctaaccttgggaatcacattttaacatgagatttggaggggacaaacatccaaaccatatcattctgtccctaacctcccaaattgcctgtcctccttacattgcaaaacacaataatctgtttccaatagtccccaaagtctcaactccttctagcatcaactcagcaaaaagtccaaagtctaaagtcttatctgagactcaaatttcttccacctataagcctgtaagatcaaaaacaagttatttacttccaagataaaatggtggtataggcaatgggtgaatattcccattccaaaagggagaaatcagccaaaagaaagagacaacaggccccatgcaagtctgtaacccagaagggcagacattaaaccttaaagttccagaataatcttctttggctccaggtcctgggcacactggtgtgaggaacagactcccaaggccttgggcagctctgtcttcacggctttgcagggtatatagccagcgtggctgctgacaggttagggttgagtgcttctggctttttcagacatgggatgcaagatgcccatggatctaccattctgggggcaggagggctgtggtcccttcccctctgtgttattttgtctgttttgctataaagaaatacctgaggctaggtacttgataaagaaaagaggtttattttggcttatggttctataggctgtacgagcataacaccagcatctgaccagcttctggtgagggcagcagggagcttacaatcatggcagaaggggaagtgggagcaggcatcacacatggcaggagagtgagcatgagagaaaggagcaagagagcaagaggaggaagtattaggctccaacaaccagctctcaactgaactcattactatgaggaaggcaccaagccattcatgagggatcctcccccatgaccccaacatctcccacaaggccccctatccaacactgggaatcacattcaacatgggatttggagggaacaaatatccaaaccatatcacatgtattcaaaggtgctgtaggaagtcccaagaattaacaatctacactacttttcattaagacacttagaatcaaattaaggaaatagtagatgtgcacatagaacaatacagcaaatgtgtcagagagaaattctatctcaattcaatcaacgtgtcaataactttgagcaaccatcatgtgtcaggcacattctgcatagtgaaaaaagacagaaaagtttccggacctcagagaacttaccagtggcattatcagatctagtcactaaagtaataataatctaatgtgttcatgccagtgttggttttagtacacagaactgctgtcttggataacaggtttgccctggtcaaactcatgttacatctctgtcccccctttttgtttttttgagatggagtctcactctgttgcccaggctggagagcagtggcgtgatctcggctcactgcaacatccgcctcctgagtttaagcgattctcctgcctcagcctcccaagtagctgggattacaggtgcacaccatcacgcccagctaatttttgtgttttcagtagagacggggtttcaccatgttggtcaggctcgtcttgaattcctgatctcgtgatctgcccgcctcgggctcccaaagtgctgggattacaggcatgagccaccatgcccggccatctctgtccccttcttatctgtggtatttcatcctgacctttctctttgactctactaaattttaactaaaaacaaaataggctcttgtaaaaattaatagcatcataatttaaagtgagtctgggaaattcttttcactcactatacaaagatatagcccaaccccccaaaccacgtagataatccaagtgaaaacatagagaacatatacttcacaagggtctgctttgtcccctgcttaatacttaatgcctctacagagcatgattccagtctgtgccctaatcgtattggctgaatgcataaagaaatgaagagttggcacacttcagaaactttcccaagtcatgtttacattaagaatgacttgtgccaggctaggctcggtggctcacgcctgtaatcccagcactttgggaggctgaggcgggtggatcacgaggtcaggagatcgagaccatcctggctaacacagtgaaaccccgtctatttttgtattttttttgtaaaaaatacaaaaaaagaaaaaattagctgggcgtggtggcgggcaccagtagtcccagctactcgggaggctgaggcaggagaatggcgtgaacccaggaggcggagcttgcagtgagctgagatggcaccactgcattccagcctgggcgacagagcgagactccatctcaaaaaaaaaaaaaaaaaaaaaaagaatgacttgtgccagacactgtgctaaacgtatgtagtatctagttaaatcattacaatgtaatcaggtaagtaatattagaacgttcattttcttaaaattccatattttctttacaagtatgaattatgacagaaagtgatgttgttttgtttttgttcttaatagtgctaagcatctgacttatttcttgaaacctgttttgcaatatttgggtcttattataacctaagttgtcagtctctttaaaacagggatcatgtcttaaaagattcattttcccccatagcatccagcatggtgccttatgcttagtgaaattctaatgattacttggtgagttgaaatcaatcaaataatcagtcagtcaagaaaaacaaagccacaatggttgaatcattcaaaatattaataaagagaataaaaaaattatcactgcagtcatatctgtactcttggtaatatacaacctcatttggggttgggcttatataaacaattaggtgagggagtgcatgtaattgtgtataaaaaacctgtaagaaaccgctatattcagaaatacctaaaaccacagtcaaataaagactacaacatatattattgccaaaaatcaagggctatttgaagaaactcacattgtatttttcaacactttttatagatactatttctgcaactgatatttattaaagaactactctaatttaaactcaatacatttgcaagtcactttccttcctgctgcaccttttccccattttctaagacagaaggacacacaattattgatgtaaccaggtctccatgtaaggctatagccacagttgtagccagaatatcctatctttcttttcaataaaataatttggagagaaacagccatgaatatttaaaaaattcaagaataatcacaataaaacctatcaaattttaacaaattaaaattggtgtaaaattaaatacatgtctgccataggaacacagaaagaatgaaaaagaaaaaatagctgctaaaatctgcttcagccccttctctgcctccattctagttatctgttccattcctattttcctcctcaatgactcttctagtcatctgcaaataacccctgtgtctgatgtttactgttcttcattatcggacactattggccatcgccacttccactctactgaagtgctcgttcagacttcaccagtgccaccctcattattaaacgtaatagtttttttcatcactctgaaatttatctttcctttctaaactgtgtgctatcggactatctctctgctccctacttaaaacccttttcccttgaacttcttgtgaagtgtttatttgaccaggtatcgtcctggatctttccacatccatctcactataggttctctgcttctatttccttctatccagtcttcaaatgtgggcatctctcagaatggaatagcaggctttcatttacttaaagaatattcccttccaagatgattccatctactttcctgtttttcactatcaatttggcaggcaattaaaaaatttgcatttgaaattttaactgttcttccaagaaaagtcctaaatgtcaggtaattaattcataagcatcccttgccacatgcgttagccatcaatatctcaaattttatatctcaggcttgttaaaatttgaacttatggttacatctccttattggaattaatataaacgattatttcagttactatgactgagtatcttggtatcagtctgatatttatctttttgttaattttcgctaccaatcagaatcagattattttatactactcctaaaatgtaccacatagccaccctatcttttcatttaaattctactattttaaataggcctgtgtgacctctagctaggtaatgttccagtaatttccctgtttctaatttctttccacatcagcttagtctctgcattgaatcataaaagggagttggatgacaaaagagttgacttctttttttttgagacagagtctcgctctgtcgcccaggctggagtgcggtggcaccatcttggctcactgcaagctccacctcccaggttcacgccatcctcctgcctcagcctcctgagtagctgggactacaggtgcccgccaccacgcctggctaattttttttttttgtatttttagtagacacggtgtttcaccatgttagccaggatggtctcgatctctcctgacctcgtgatcctcccacctcggcctcccaaagtgctgggattacaggcgtgagccactgcgccctgccaagagttgccttcttaaaaagtcaaggtatcaccattcttccccttaaagacattcattgggttgccaataataatagtaacaatagtaaatatttcttgacaacttagtatttgttaagacacatgatacacactttacttcagaaaccaaaaactgtgggtcaaagtgggcctgcatcattcatcgattcactcatcactcatttgttcagagtatttatgaagcatctttgcatgttagtcactgttctgtgtttcttcaactgacatatgttgattgcttcagtatttttaaaaatttgaataggtttcaacatttttaaatggagagattaaaagatattttgcttaaaaaaaaaaaacaaaaacccgtgaggcacagtatgactctttcaggacagcaatctatttaatctgtagatattttctttcaccctgagatattgtttccattttactgcaggtcatcactttcttgtgaactgagcactaatgacattataatttttcagtatgcttgcactactttctattgtaaacattcatatttattaagccatagtctctaataaaactaataataacattactaaaagggctctatattttttaaaaatatgaatgagagaacaattctttgtgaaggaagaggatttctacctattgaatatactaaccaaatgtgtcgctgtggaaaatgaatgcgacttaagatgccatttgaaattgacatactgagactttgggtgtggctcccttttactcattggctattattgtttaagcatgcggtttgggatttgcatgctctttcttaattctcacaactcttcatattaggtactagaaatcagaaaaaaaaaaaaaaacacaaaacttgtccaaggacacatacctaataatctttcaagccagcactcacgcttagctctgttgaagccaaagcctgtgctttttcattagagttctttcgtatgataatctatgatttgcttccaagctacttttgctgattcatttcttcccgcactccaaaatgttcattgctttctccttatgtagtacttttatatactttacttttgtttgtaccgttgttctctttttaaatgttgaaacgttagactctatccaagcctgttcttaccttccttctcccagaagtggcctgctgttctgtgagagtggtgcttgcattatggtaaccatttttctctttgtaccatgggaactcatctgtgtttcctatgacttgagtacaaacttcattaagtcagaaagtcagcttgtggcagattttgtttttaacgtaatacagcatccagcccaattttttttttattacatagtaggtactccattaatgtttattgcattctacttaatataattagagagggttacctatataaacaatgtttcaagtaatgatttctacaatattgctctcctttctaactttatggccattaacaaatatggaattacttgttacatgacacaataatcattgtatgtgtaaccttctatttctttaagaaatagtgaatgggttctaatgggattagtgactgacattatatttggggtacatgcttagtacatgttcaatgaaatgtgaattattgcatcaataaataaatattgaaacttacaggtaatcataactagtttaacattgatggtgggggtcaaaaagtgtttgtacttttttgccaatccttcattgtttcactaaaggaatgagaatatggtatactcaaagtgatgactttctgagacgttctacaattgacttttccttatgaaagcagtgttgctaagcaacacttgtgcattggtatatttctttcccaaactttctatcacaaggacagcccaggattttttcaattgtaatcaccggactctcttgagaagtaaaccacaacatagccaccaagctatgcttcatagtttgcattgaatttgatggaagatgaacactccacttgacccccaaatacgcaggtgattgccagcagggacagttccaaagtgcaaatggagtatgatttatgacacacgtcagaaattacaccagttgctggttttcattatgttgcctaactctgatctgcatgaggtacctgccttacaaagggtatgcactggaaggctcataaaaaatcatgtgttctgttattgagacacaacttctgtttccttcaagtttaaacgtcaaaaatcacctggctgacaaatctctttctctagaatattgatgcactgtacactaagactctggcatgcttcctcaaggaagaataagaaaagattttcatattaaatgtttccattttccatgtgccctgacattatactatccccttttcttttagttggctaaggtgaaaaggctgcagtagtttcttctgttaaccaggagttaaattatagtagttttacaaattctacactgtttaataactttaagaaagaatttttgttagtgaattatttttctcaaactattaaaccgtattcttttccatgtgttctttttgttctttttttttttttttttttttttttgagacggagtcttgctcagtcgccaggctggagtgcagtggcgcgatctcgcctcactgcaagctccgcctcccgggttcacgccattctcctgcctcagcctcccgagtagctgggactacaggcgcccgccaccaagcccggctaattttgttttgtatttttagtagagacggggtttcaccatgttagccaagatgctgccgatctcctgacctcgtgatctgcccgcctcggcctcccaaagtgctgggattacaggcgtgagtcaccgcacccggccctgtatgttcttaaatatttctaatctgtcatttattttaatgggaattgttctcagtaaggtcccaaagattcttagcaaactagcagtgtagcataacacacaaagcacgtgagtcttggaaaactgggtcgtgaacatcttaatttgcaagagtttctacttcagtagaaatgtcaggcttcacagaacaaagattttaggcttagaaataatgaaagttttcgaagagttttattccaatcataaaatggctctcagttggtctataagtgatacttaaagtagaaactcccagccaacttcaagtgtttgggctccagaataatatgatgagaaaccagaagcagtcttacaacacagccaggagctcaactaggtgatgaggaagacagtgagtgaatggaaaggttctgaaaatgagtttccgaagtggtaagagataccccctggtgtacagaaggaatcactgcagcctttttttgctttggtcagcaacaacaaaaaatgacaaaggtatgtctataatcatatccatattggatatttatagggcttgttacacggtgaaaaagttatacagattctgtctacaaccatgattttttccccttcaaacgctgtcttctttataactctttaacaaacacctcatttatgttacctctactggtgaaatcatctgccctctagcaatgctgagccacttttagcacagagaaagtggactttatgaatcagaagatattgtaaattaggaaagcatgttctgtgaagggcagccaattctgtgaaagcatgttctgtgaagggcatgttctgtgaagggctgctaattccctttttcagagtttactctccttttggattatcctttaacattttatccttccaaagcctagctcatctcccatgaaatgccttattctccacagcagcaggattgtaaaatttaccttccttagggtttgtggcattatacagctcatgatgaaagagataaaggtatgaggaagatgagagaaaagtggcttccttacttgactgctccctcttcaccatattccactagattgggttccattattttaaccctggatcttatgaatttgccttcaataaagtgactttgttgttaattatctactcagattatggcctttgtttaacaaccaaacacaaagtattattggtatccataccatctaaaattaggtatactgaaaacaaatgctatagataacttcacaattgccttatgctggaggctccctgcatgttctagtaaaaaaaactgatgatttcaatcaagatccattttttctctctttaattcagggtcttagaactctattgagttttaccaaacttatactcagtcagtgaattactctaattaaccagtgaagacaacaaactcaatctaccatctctctcagcccacaactcatccagatatcactcctgatgcatgctttctggcaataacaagaagtagtaagaagagcaaacatggattttagatcaagattctaatcctaattttacaacctattggctgtgaggtcttggaaaagttacttagcctctctgattcagtttctttattcttacaatgggaatcataatgttttcagagtttatgtaaggcatttaaagtatgtgcttaaattaagtaatcaatggttgtcctattttggtatacaatgtttctattattatacttgtcacttctaagtttcttagcatatttaatgctagttaatctcatttctcttttctccatctatatttttctctctattaattgttttgaacgactcaatactttataaagtcacccatggacgtttcagtaccttttactcaaacagaaaaagcaaagaagcggagaagtgcaccaagtgagaactgacagagttatataaaattttccttagatctaaaaatttatacaaattatctagccctaatcatggtacttcacagtttgataaaaaccctactcatctaaacaggagtttattaaacttaacagaagctgatttttaaacactaaatcaaagacaaatgttgtgattaactttcagtgagcaattaggtaaatatgagaaactagtaaactccttgtttcctacccattgtatgacaagggtaaaagcaatttaacaaaatatttcttttgtttcctttgtacttctcagtttgatgactgaagattcaattctcttcctttagagactcaaagaaaatacacaggaggggatacatttgaaattataccttcaaaatgtcagtgacactaactgatgaacacttaagcagaaacaatcaactttaatacttttcaacacatataaaaatatattcctgttttatttctttcttgattttaggttagattcttaaaatcctttcagccacattatctgcattcaacaaggaatatattcctttcaatattgatacagatgaagattgacacaaatatgttaaatggcctgcagggatagtcttcacatataaggaagaaagtttaaagtcagatgtaaatacacatgtgcatttgttcaaacatcaacactttacttgatatttacaaaactgaggaatatttttgacacttattgtttctgtccaatttgttaaaataatattttgttgattttatgtgttcttctattttccatttcttctatttttttttaactttagaaacataccatactctaggaagaacttaggaaggcaaacatgttataaagaaatttttgtttgttttgaaagtgtttaatggaaattttagagaaaaaaatgagaaatttagtcacctaaacgatgtataatgaagaaagaaattagacaaataaaagaaagttggggagtctaagggtaatcctgacaactagtatctcatgaaaaaaagagacaagaaactcaaggagtttcatgaagtggaaaggtttttgtgcttcttccatatacattgtgtgtgtgtgtgtgtgtgtgtgtgtgtgtgtgtgtgttttcagatacatataaatataatacaaatggaatattcagtgtcgaattgcatgtttaaatggtggactttttacgacattcaaataaatttgtcccggttgattagatttgaggcccactagaataactaattactaagcatcataattcaagttcatcataaagcatatgttcacttgttttacagtaaatatcaattcatgaaaggaagaaaagtcttaaaaataaaaatcagttaacccaagttatttcaagtcataaatttaaatacctactagattcttcagtgaacgctgaagagcagttatttttatggttttgtaccttatgtaaacctggcgacatatatttgacttgaaacgtgtagcactttttaacagatctcataagctacctattagataaccagatgcataataagacaggcaagcagcattatacacaattctcttaagacaaaattaaaaatgcaaaaaaaccacatacattatataacaataagaattataaataagaatataataagtacgtaataagtatgcttagccctttttcctaaaacaagaggacttacatttttaaaaggtatttggctttattttctaagtgaaatttgaatgttcaaaaagaagttctgctcaatagtaatggcagaaataagatcatagaatgtaaccttgggtgtaaaacttgtgtaacacttatattttacagatggggagagcaagcttgatgacctatagaaacttatacctgccacgagcatcacctgtaaatgattacgatgtactataccactctttggagtaaaagttgaaaaaaatcatccactgataaagtcacttataaagtcaccatagattattgactggtgtttccaaaaggaaaatgagatcggtttttgttagaagattattgtatcagctacatcatttaaattcactttgaaagatacccagccattataatcaggtgactatggggacagcatatattattactaaaagcaagaaatcattcttcatttagaaggcccaatcaacaccaaagaagcatgattctcacaaattattgcctattgaaacaataataaatagattcaaaggaaacaatacagagggaaaaataatgcctcacatggtcattatgaaagttacaaattgaatactggagtgaaggtcaagtaaatgttaaaaagttagtgcacaaacacaatcaccatgctaagtgagctgcaggtaaaactgactttctaatttggaggattagtacaatcaaaagggtcaaataagttgtacatgatgccataatcttgatgttcatcgcttaaatctttattgagattaggttgccatttctttcaagtcttttgtcattaatatggatttttttttgccaaagactgaaccttttataaagcaagaaaagtattaaagaaaattaataaataaatgagtatttctctacatcgtataaaatcaatttgtttgatcatttgcttggattaatttattttcaatgatacagacttagttttaaaatagcattccatgctgctcctgagtattagatacacatttgctttacttgttttaaatattatggtcttttaatattttctaccactaagaataagaaaaaaaaaactgtccataccaacaaaatactcccataaagaacctgactatgatatgctcctcaaatgaaaaaaatccatcagaagaataatgtcctttcaataactccgtcacatcacatctcactcattgaaagcaccttgtgagtttatttcttccttcccatggaaacctcctttcacgtggtatctctgaggtcgaaattcagcagcctggaagactcaatatgatgtgaaaggtatccaagttgagatttattctacaacaattaaataccaaactagtcatattccaaaatagtttgaggaaaaaaatgtcatactttaaatatcctggctcacaaacgatcaacacaggtcccagggatggcacaaagatggttctaattcaatgaatgcggaatgttagtatcttcttaatggatgttgatctggttacagggaatatgcaccttacatgaccacagagaggccagaattttatttttatcctgtttgccaaggtctttatctctacagccaaaatgagaatggtgatttaaacaattgaagtcacagtactcaccccaaagcttttgtggaagcctagattgtcagtgactgcagctattagggaaatgaattcagctgggtagaaaaagccacatgacttgagttcaaatgtcactctctgttctctgtacaataaaattgtaaacccttagaagtggggctggtaaagcctacaggctttacatctcaaatagcacatgagcccctcgaaccctttaatattcccttgattccaggaagggagggcctcttgaatattaacatgtttgaatttagtattcctttaatcaacttgtgcctgtaagaggtaatgtttccattctcaaagccttggcttttatctgaccccaactgagatccccataaatttactccatgacatgaggtaatccctcaactgtatttcaaaagattgttttgcttcactaattatacatgatggcttctgacattctctgtaagaagatatttatgtaaacatcatggtctgtccaccattattcaaaaccaacttctgttaaagggttaaccacttaagctgagtccctgggatagacacatctcttaacctggcaataataatcttaagaatagtaagtgtttatgaatacttattatacgccaggaactttagatgttttgattcacttaacacgatcccctatgaggtaagtattgttattaccctcattttatagatggcctagagagctgaagtaatggaatgcccgacgtcatcatggctattaagtaagtgtgtgtgttgaatctgaatttaggtaagctgatttcagaggctatgcttttccacttcactgaattgctgatttatagagctcgccagaaggggaaaaagcagacacctcttgatggtgttttctacaacacacttagatcacctaaaggcttggggcataatttttgtagacatggtttatctttgttgacttcttatccatgtccctttgatctccaccctttgcccctgccacatccatcctgaagaggtcagtcactacgtggcctctcttgggggctaggttttattactgagtcactccatccatgtgagtttcttcccttgactctgcatctctggttccatgtgtgttcctctgctttctccttttcctctcccttttccctcccaatatgtgggtggaaagtattccagaagtaaatggtaataatgtacaggatggttcttttcccaaaccctcaggaaatgaatttacaattctcaccatgaccacaagtcttaaccctatgtgctaggcaaaggtttaattcagagaattttagtcactttagaaaactggataaattgtttgggaggtatagttaaaaaataaattagatttcagtagcactcttgttacttaactaagagtgtgcttatttatattctgggctgaatctggtatggaagaaaatatagacatttgctctaacttgggctctgtgtcattgacatttatgacttgtttttgtgaggctactcagtatctaagacttgtttctgtttaggaggagacagtactgtggctcccaatgcagaccttaaagaggactagataattcctttcattgctcccagtagcgatgtcttaggcatttgaattaagcttggctaatcaactgtctcaactggtcttggatttttagcaaagtgacacaaagacaaaaaacggtattcagaatgtatctagagcagaggtatccagaagcagaaaaaaatggcaagaggaatgtcagtagtagcagtgccccactctagtggtggctaaaaagaaaaatggcagtaatgacaaaaataatatcctaacaagactattgctgtgtcattgatttgggtgctatattagctatattgacaaccctgggtcgcatcccacttctcaacccagtctcccagatttcccacagttcgtcaaactacccatagtctcagtaaagtttttgcatgcttattaaatagtctgcctggtagacagggcttgtgtttcagtctcttcatacagtacagactgttgacataaaagttctaataaattactgtacttatattttccatttactctttgcctaggaagtaatccaggtgtttcatatgagctgtttaaatcttttgagcaaactatttcccttattattttaacatgaaaatagagcatataaggcatacaatttaaaatgggaacatatcaagcttaatagccatcttgcattgtaaccatgactgatataataaagtaatacatttagctttatgaatctgtaatgattttcaattcaaatgcattaaagttgagtaaatctagattgcaaagaagaagctcattattgagcaggagagaaagataagcaaacatcacattatatgataaaagtggttgtgagaaaagaaaacgtgaaaagaatacagttgaggatagggtgtttgttcatttttcatgaactatgatgtcagagtagtttttgcacattaagacttgcaagatgaaaaggtattatgatgggatgaaatagagacaccaggtattataaaagaataagtgcattatagtaataataatcattattattatggatattgtctaccatttattctgcctggccattcttttgtactttgcaaataatagatcgtttagtcctcaccacattacagggaaaacaatgagattattttcaacttgcggataacaaaaatgagatttaatgagataaaataaatttcccaagttcagagaattaatcctcagtcaagttagtattggaatccaagcagtttgacttgaactttgagtttctaactagtaagaatggcaccttaagatgtaagcaaaataaaatttgagttaggaaaatccttagtagagactactgtgataagagatgaaaaaacataaaataagaaagaagaattggtgatgcagacagtgtgccatctttgagaaaaatataaatgtcaaggttaaggggaattagtagccaataagtgaggagagggacataaatggataattattttcacaaaagtttaattttgcagcacttggtggatcaaaatgctggaaaggggtttgtagagaagcaaaaagggtgcatgtgtgggaagaagaatctattggttagaataagtttaagctcagctgtctatggagacatgcatttggaaacattcttctggtagataaatatcagaagaaagaccggtttgggagagatgccatatatggcaaataaaaatacagggtgcccagttaaacttgagttctgaataaataatattttgtttagcataagcacgctctatataatattttagacataccaaaaatgtttctattacttatctgaaattctaacttcataatttgttcattattgtgtctggcattcctatagactgggaatgtagattcgagcaccacaacttgcagagaagttgtcaactactgcttagagtaaaggaggttagctttaaataaacaaaggctagacagtgggttctctggtagaatacaaagctttatcttttccctctcatctactctctttgcgttataactttgaaatgttctttcactctgattcctggcacagtcatataacatggtgttaccagccaaaaggcagaattgatgatgttctggttctgagcatgaaagttcttgcaagaatctagtttgctctcatactcttgccatcttcatgagaacacagtaagtagatctagcctaattttagagtgagagattgatggagcaaagccaattcccacttttaccccagtcaacagtaagtcaaaccccagtcatgtgagcaaacagcaaggctatcttacttcccccagccgttggatggttgagcatgaaccatcttattatacagcttatcgttgtatgtaacacagcagtatgatggcaatagaaaatggaaacaaagtcaattataatagtgtcaaaataaaagtagcaataactaatatatattgattgcagactatatgacaagctatgctttgaggttttgtatgcgttactcatttaatcctcacaaggatcctatgaaattgttgctattgttaccccagttttacagatgagaacgctgaaatccaatgggtttaagtaacttttccaaggtcaccttggaaagtaacagagctgacagtctgacttaggtgaatttgccttcagaaagttcatgcctaaccacctagtgacactgcatctcaacaaaactttgaggatgacactggatttgccaataaagaagttgtttggaacatttactgcattagcttcaactaggtgacagactattggaggaggatggaagactgcactagaaatgaggtacagaggaagagagagaatgcagagggggtgcaagtattcctttaggtcattcagtgacatgaagaaaaggggaagagatgacagtcaacttaaagatagaccaagaggacactgaggttttaaccttggtttctttggttgtgtttttcataggactttgtgtatgtctgaagatagtatattgcactcagacttcctgggttgaaaacccagctttgccttgtataaacatccaactttaggaattttttagcctctctgagctttacttttttagcatacaaatacctcaaagagtttctaaaagactgaagcacagtatcccagaatatagatggtggttccaggtaggtcaatttcaggtgtcttcctacaaggggaaactccaaatagaaggataggtaatagtgaataaaacaataagccacaagataagaaagagaaaaaaaggaaaaatgaatgcctcaagtcttacaggggagaaggaaaacttctttctcagagacagttgagaacaaaaaatgggtgaacataaatctgcaaagtgagagagggagatcaaggtatatctctcctgatgataccatagaagaattttgactggcacctctacttcttaaatgtgaccagtgacatcctatgattaaaacattggaccttctttaggggcatttgcctcgccttcactgctcaggtgcacaaacttatgcttagagtcaaaatactttttaatttatcacaggttataatacctcacaactcactattgcatggtttgtggaagttatttaaattttccaaagtgcaatttcctcacctattccacaggaataacaaaatcatataccttataatgtgtgaagtttatgtgtgacatgtcatgaaaggcagaaaataaatatgaaccatctttactagctatattgcagttgcagttggcttacgtttatgcctgtaaacttaaaagagcgtccagcacattgcagaagttaatgtctacctatggaaaagataaataaaacatgatattaatttagcataaaagtagagcttttctacattttcatcaataaaatcatattattataagaaaaggacacaggattcaatgaggatactggcatataaattaataaccaatggtttggcactatgatagatttatttggcacatattttatgaaatactttctgtaagccaggcattattctaggccctgtggatgcacagatgagtaaaagagattaaatttctgcccatatgtcgcttccatgtcctggggagatacaaaatatgtgagtcaactagcaagtgtatagcatctcttggtgataagtgctatgaagaaaaggctatataaacgaccacaggccaatagcatctcagggaagacctctatgcaaaagcgacatttgtgcatgatgctgtcaagtgactgctggaatctggaaggcatctcaagagaagatacttaaattttttaaatttttattttactttaagttctgaatacatgtgcagaacgtgcaggtttgttacataggtatacatgtgccatggtggtttgctgcacccatcaacacaacatctcagtttcaagccctgcatgcattaggtatttgtcctaatgctctccctccccttgcttcccaccccctgacaggcccctgtgtgtgacgttcccttccctgtgtccatgtgttctcattgttcagctcccaattatgagtgagaacatgctgtgtttggttttctgtttctgtgttagtttgctgagaatgatggcttccagcttcattcatgtcccttaaaaggacatatctcattcttttttatagctttgtagtattccatggtgtatatgtgccacattttctttatccagtcaattcttgatgggcatttgggttggttccaagtctttgctattgtaaatagtgtggaaataaacctacatgagcatgtgtctttatagtagaattatttataatcctttgggtatatgggagaaaatgtttgcaatctacccatctgacaaaggtctaatatcaagaatctacaaggaacttaaacaaatttacaagaaaaaaaccaaacaaccccatcaaaaggcatgcaaattatataaacagacgcttctcaaaagaagacatttatgcagccaacaaacatatgaaaaaaagctcatcatcactggtcatcagagaaatgcaaatcaaaaccacagtgagatatcatctcacaccagtcataatggtgattattaaaaagtcaggaaacaacagatgctggcgagggtgtggagaaataggaattttacactgttggtgggagtgtaaattagttcaaccactgtggaagacagtgtggcgattcctcaaggatctagaaccagaaataccatttgacccagaaatcccttaagttaaattttgaagatgagtaggaactctttttgagaagtgaagagcagcgcatgcaaggtaaaggaggagctagtataaaggcagatatttaacaagattatggatcatttaggtaaatacacatattaattcagtcggtgtttgctgagtgtaatatcatacctgatgagccaactgcatggtccaggctcttctgtaacttgccttttaataaaatttccttccatatcagcatattgagcgcttcattgttttcatcataatagcagcattatgtgtcattccagggagagatataaggagtcattttgaacaaataacttttaacaaagggactaaagaaaggtggcaggttttgagttttggagatcagataggaatagatgaaaaggtgcagccatagtccaagtggcaaattatgaccatcagcattagataaaaggtaaaatgaaattgaatatatttataaagaattatatattttatgtatctgttaagaagatagcacaaaatagctaccaattggctatggagatgacagaggagacatgtgaagcttctccatattctgacttgagtggctgtagcgatcacaaattggttgtccttgtcaaccaattaaacaatagaatccacatggtctctacaacccatagtaaggtgcttggcagaaacataactaaatatataacaatattaagccttagaatctccaagttagtagctcaaaccatagatggattcatagctgcaacctagtcctctaaacttcagaggccagcagtgatgtctgtcaaacatatttccaataaaagggaatacttttattcagattaccaaattgctcaggtatcctgaatttttattctatacacatatccaatacaatattgattcaattgatctttcatagtaatagagcatttttaattgattaaagagtttttatattgatttgcattattagaggtttctgtgaccaatctgagtgcagtagtaagatgtgaccatgattattatgtctgaaaaaactttttcggtggaagaaagaaattttactttttgtatccatgtttcaagaaattattcattctccaattttatcctttaacattaatcttggatcctaaattatgcaatcactatgcacaagcatgactaggtacacatgacactattataccttcctcaaaattagaatttatagttttcatcaggaaattccccctctacttgcattcataagaattgtatgttctgtagtatattttaaattttgaaggtgagttctacagtatatcttactgatatactgtaatagaaatcaacagaaattcagttctcccagcagaactacttactgactgcaatttagaaatatctttcacgttcccagcttccaattctttaacaatctaaccaagaataaaaacatcttttgcaatatacttttaaaagccatgacattcaggagcatcacaaattatatttgggaacaaatcaaatttaacagcacctggacagtttagatcggaaatcaaaaagaccttcaagtaaggccagcacttaaacctaatgaggatgatttttgttgtttttgcttcccttttttggttttctaatttgaaatagaaagtgtggtgtagtaaaaaggtaacagatattctatcttcaaggtcatctttagtaggatataatgtctgtctggagaaaattaggttgactagtcacatactgtacattctaaataattgttctctaaaagcacccaccattttttatatgtttataaagggaagctttatatatgcttacaaccctcatagagcaaatataaatatgcagactaattcacacattgttaaattttagagttgacaaaggacaataaaaaaatcaaagatcgaaatcatacagaatagtaactacagttcctataatctacaggggctacgggctattctcctgtagattttttgttgttgttgttagaacataaaataattagctaaagctaaaaattagcttaattaaataattaattaactcttctattttgtccaaggaatttagaacttactaaaacttagattgcaaaacctcactagcaaaattaagcatttgccaagggtagctgctgaagggtctttaaatcactgtctttcagtttaacagcacttggacaggtattatatctggttctcatttcagcttcacaaaagatcaattatccatgctcattatcctgatctgattacattatatatatcaaagcttcactctgtgccccataaatacataccattattgtgccaattaaaaaataaaataaaataaaacatggaatgtgttctaaatgtgattgggcccttaacttatgaatttttctctctctttcttttttgatttctctcttgcttctttcttttcttctctccatttttttgcttccattgtttagtttcttaatttgaaatcaaaactatagtatagacaaaaaggtaacactttttctatggaaattatttataaatagtgttcctcttttagatttacaaaaggataaaaagattttctaagataaatagtaggggtccaaatttgaatttaagtggattcagacatgcctagtcatgtcagacaaactggtgaaacaggcttctcttgctactttgaaagttgactgagaaacattgcagaggacggttctatctgtgtttactgttggtgttccaagatgcctggccacgggtgatgaacttgtaaaacaagcctgaaaggaacggaagaattttttgggtgagaaaaaattcctagagaaaagagagccaggctccttgaacttgactgagaaatgaagccagagttgacagcccagaaggtttcttatcagtaaagcctcctgtgtattattctcatgtgactttgtgtcatcatccattcacgacaagccatatagactgttaagagcctctaatagggtgcaacaaaaaaatcagaaagcatccctccggcttatcccaatttttctttcttttaattttttttaatttttttacttttgtggggacatagtaggtacatatatttatgagttacatgagatattttggtagaggctttcaaagtgtaataatcacatcatgggaaatggggtagccctgtcctcaagcatttatcctttgtgttacaaacaatccaattttactctccaagttattttaaaatgtacaattgaattattattgacaatagtcccctagttgtgctatcaaatactaagtcattatttattctttctattttttttgcacctattaaccagccccagtcccctccccaaatacccttcccagactttagtaactgtccttctattctctacctccatgagttccattgctttgatttttagatcccacaaataagtgagaacatatgacatttgtcctcctgtgcctggtttatttcacttaacacaagaatctcccaggatgttggtctgggcaaaaatttcttgagtaatacccagtaagcacaggcagtcaaggcaaaaatggacaaatgggatcacataaagttgaaaagcttctgcacagcaaatgaaacaatcaacaaagtgaagagacaacccacggaattggagaatacatttgcaaactacctcccattttttgtacaacattgtgccactgggtttcagtgccgcatttcagtgggagttgcctcagtcaaatattggacaatggccttcagggagatgctaaatatagaatgtagttctgagtaggaaatgagtgaaacttcccaatctccttgccgcaacctcaactgaagggtggacaaaaagcaaacacatgcctggccagaacaggggtaccaagaagacgttcagctaacagcaaccaacgttgcacagcagaatatgagaatgacactatccttagtgattccaggaacacttgagggacacttgagaggggctgacatcctaagtaaatagacaggcaagttatttttatctcttgttaatatgatatcttatttgttctcaagcttccgttaacacagtaaactagaaacattttcatcatattccaccatggagccacagatctcactgcctcataagtaaactttttatagtagttgcaaaataaaatgttaaatatgacaatggaaacattgacaagaactaaaatatttatactttacttcatttattagataaaagcaaaatacaagtttttgctaggatcttgatagataacatcaaggtaatggtggtaagaaaaataaagcaaatttagaagaacaacctagagtagttatacatgaatatgatttcaggtgacggactccgaaagtaaaaagacaacaaatattcacagaagcagcttaaatctattttaaagatttaacatagctaaatatctctccattgatgctgaaggcaatagaatggatttttggaatgaaagcacgggacaggaccaaacacatttggaggtttctcctctgcttccaatttcagcaattcatttaataaaagccagagaatccgtatcctccattgtacgatgggcggcagcagccatatccatagcctccaaagccagagccatatccgtagcctccaaagccagagccatatccgtagcttccaaagccagagccatatccgtagcctccatagccacagccagaaccccgtctgcagaagctgccacatccacagccatagccatagcccaggccaccgaagcctccacagctgtagcccaggcctccgtagtagctgccgtagtgactcatggtgtcaggagtggtgagttggtttgttgttcaggcaagatcctgagtgtgaatgccagcatgtataggaggtttatataccctggtcagagcatgtgataaacatgtgcccctctttttgtgtcattccatgaattatacttgcctgaggcagctcgttaatctattgtcccctgacaacactcagtaagattgcctgagcttgtttggctacctagttaggttgtccctgagcttgctgctttaattttattagaagggattgctgcttcttcaaagtctaaaacataccaaaccttaaatagaattctttattaccagtcacttaacatcagtcacattaaaaattcttgaatttctattcaaatatattctcatcactagcatttttggacgtggttatagttgattccacaaaatttcaagaaatagccaaggtcaagactcttactttcatcagtttcttcataaaacacacatattttgtagagtgagaagcaagaaagatttgattcatctgtgtatgtacctgaaagaaacaaatgtcacctaatttgtagacttttaaaactttgatcatgcacaattgttatatttattttgggctttgcacaacagcatacaaaatatttgttttgttttaagaacatagcacaattgtagtcataagtggagagactcttacagggatcaaaagcccatctcatctggtctttccagagttttctatttatatctcaagtcccttctccattatatgttctaacctcactgttaccaaaaaatgaagattataatctgccttcatacagaattgtttctctttctctaccttttgtcattaattcatccctcttgcatcttttgctgatctcacttcaaatttcacccaacttcttttcctccacaattcattactataaccaggtaaaagtttgaagtaggtaaaatgttctggctacaacctatttactcaaatcaacattcattctttccatttagatctccatagtcaatatttgcccttgtctttgcctattctgtgcccatgttttttgttgtgctttgttttaaccgctttctagttatcttttcctgagaaatcaactagatcttctaagatattgattatggtgtttcttgtttaaaacatttttcaactcttcaaattatctgaaatttaaaaaaatatttgtgcaacttagattaacacgaaattctctaaatgtaagggacaattgtgaaaaatatagaaaagaaggagtagctctgtagggagagttgaccagtgagtccctcagctcagcccatagagttagaaatgcccaaggcttacctcatacctgattaagcctcatccagatgtacctatatcttgaaacttggaactccagaaaggtatcagttttatatgactataatcatactactaagatttttttgagatttatgagtaaccgaatgacacattttaaaatttttattttatttaaattttttattgatacatattttacatacttattagatacatatgatatttaattgcatgcatagaatgtataatgttcaaggtagagtaattgaaatatccatcactttaaatatttatcatttctttatgttgggaataaatcaagctctctcttccagctactttgaaatatacagtatattgttgttaactatagtcactctgcaatagaacttatacctttcatccaacttttatctctcctgcacccacacacccattccagcatctgatatctatcactcttttctctacattcataagattaacttttttatctcccacttatgagtgagaacatgtgatacctctctttgtgtgcctgtttatttccctaaacataatgactttctgttcaagtcacactttttttttttttacaatgcggtgtttctctgacctgctgagtgtcaaaacaaagtctcatatttagttggcattcaaaaatattatttgaatgaagcatatgactttgacatcaatgcaagggccatgaatagcataacatgagcaacttactggctattctgggagatgttgtaaggctgaacgcaagttccaacaagattcctgctgtcagagtagcatttaacccaacaatagccttcctctttgatgtctgtgttactgtaacccaatttcattccatttttattctccatttcagaaaatcagtcaagtgatacaattcatatatacatttctaatgaaacacttagaattatgaataaattacatagcattaagaatttcacattttcttgtgtagctctgtcagagcatgtgaccatgattaaaggctattttgtttgtttttgatacataaaactgtctctatatggaaataatatgagacacaaatgcgaaacttctatagtacaataaacactaaatgtattttcaaagaataaaacatatgactatgacatgcatagcttattttgtccactagccgtgtaaactagaaaaaaaatttgaagaatatgtaaaaaatctgatttattttctgtatatgcaagtgaaaaaagtctctgaaatttcctttgaggggttattctttttctatccatttattggatcaaaagtagatttggatcattattgctttttaagaactgttagctcatgaccctattttctactcatgttgataggtggaagagtgaaaaatgttctcacatttttcctggaagtaaggaaatttttgttataaattttctatcatctcagaaattattcaatacaaccttaaacagcatgaaattataagattgattatagtaataacaatagcagtaacaattatattgattactgcttttcagccccatggaaactatccctgggacattatccaaatgagaagaaaatgcttctagtgaaatcctattctactgggtcagacaatattgctgacctcccatagagttactttgctgtatttcccctgttcagcccattgttgtagtacacagaatgccctgagagcattgactcaaagaagaggtcatggcgctttgttttgttttttaacttagagtctgattttaacattgctcattggttagttacaatcagaagtagataaactaaaatttgattggtttaattctgtatatcgcaacaataaaaatgaaacatcaatgttaatgtaagaaaaagggccaaccttcataaaagcagttgagataatttagcttttcttacaactatgaccagaactttcagaatggttatctgacaacaatcaagaagaaaatgcataaaaggtgagtctgcaaagtatagtctaaaacctgggactcaggatggcatgattctgatcctagtcttggcaccaattatgacaaaaataacatattctgaatttctgtgcctccaaaattggaatacagcgttgcagaattgtaatgcctctttctgctccttgtgtgatttaatttttgtcctcattttattacatttggcgagcttgtacaaaacatctgtaggcacatatcattgcctgaaattctgttttataaaaacaatattgttttggccatttcttgaaaggatgaggtttcactgaaatttatcttcatatgtatatatatatgtgtgtgtgtatatatatatatatgtatagagagagagagagagagaagtatgtatacataatgatattgatataagacatatagaaatatataaaatgatatttgtataaaatatatacattatatacaatatatactatatatgtatgtattatatattttatatataatatataataaataaattaatatttcattaatatttaaacatatacttctatatattaataaatataaataacaaattatcaataatcatattgaaatataaataaaataatatttattattcataatacatataaatataaaaatatatttatttatatttaatatataaatttatgtaatatttaaatatatactcctatatatttaaatgtaatatttaaatatatactcctatatatttaaatgtaatatttaaatatatacttctatatatttaaatatacatacttctatatatttaaatattaaatgacacttttagtcagttgaaactacagaatattttgcctcataataatgtttctgtgtgtttatagtccctactgcattacaaatccttcagtataatgatgataataaagaacacaatattcctataaaaagacaagtgaaatgagttgaatgactacaattcacattttattatccagtttatcaaggacttttaggtcaggcttgttgtacatgcataacaaactagatgaaagcagaaaattatgaataaaagaagattatagataatgcaaagattcatagaaaaagagagttcacttctctttaagttttagggatatagattataagatttgtgagaagaaagtttgtttttattacagttttaatgatatgaatgttgtgatgcttaattttaagtgtcaatttgactctgttaagggatgctgggatagttggtaaactatttctgggttgtctgtgagggtttttccagaaggattcatattttaatctgtagactgagtaaagatcactcttaccagtgtatgtgagcatcatttaatctgttgaagacctaaatagaactaaatggggaaggcaaagggagtttgctctctgagctgggatcttcatcctctcctatcctcacacatcagcattcctggttagagcatttggtctcagattgaaacttaacatcattgactcccctgttctctaacttttgggtttggactggaagtactagaccagctttcctgggcctctaacttgcaaacagaagatcatgagacttctcagcctccataattgcatgagttcttccctaacagtaaatattcttctgtatatctatgtatatcctattgattctgtgaaatgctttatatgtgtgtccctgcccatatctcatgtcaaattgtaacccctactgttggaggaggggcctggtagaaggtgattgggtatgggggcaatgtctgatggtttggcatcatcctcctactgctgtcttgtgatggggttctcccgagatctgcttatttaacagtgtgtagcacctcccttgacctctctctcctgctgaccatgtgaagatgtgcttgcttctcctttgcctttcaccatacttgaaagtttcctgaggcctctctaggagaagcctgtgcagcccacagaactgtgagccaattaaacttatttactttataaattacccagtctcaggtatttctttatagcagtgtgacaatggactaatacagaaaattggtaccagagaagaaggacattgctataaagatacttgaaaatgtggaacgactttggaactgggtaacaggcagaggttggaacagtttggagagctcagaagaaaagaagatgggagaaagtttggaacttcctagagatttgttaaattgttgtcaccaaaacgctgatagtgacatggacaataaagcccaaatgaggtggtctcagatggaggtgagaaacttattgggaactggagaaaaggtcacacttactatgctttagcaaagagactggcagcaccgtgcctgtgctctagggatccgttgagctttgaacttgagggagacaatttagggtatctggcagaagaaatttctaggcagcaaatcattcaagatgtaatatggctacttctaacagcataccctcatatgcttgaacaaagagattatctgaagctggaacttatatttccagagcataaaagggaaacatagcataaaagtttggaaaatttgcagcccagccatgtcatagaaaatgaaatctcattgtttggggagaaattcaagcctgctgcagaaatttgcataagtagagaggagccaaatgttaatagccaagacaatggaaaaatgcctccaagtcatttcagagaccattgcagcagccctttcaccacaggcctggaggcctaggagggaaaaatgattttgttggccaggcccaaggacccactgctctgtgcagccttgggacatgttgccctgagtcccagacactcaagctccagccatcggtaaaagggctccagatacatctcaggctgatgttcccaagtgtgcaagcgaggagctgccaaggttttcacatggtgttaagcctgtgggtgcacagagggcaagagttgaggcttgggagctcctgcctagatttcagagggagtaagaaaatacctagatttccaggcagaagtctgctacaagtgtggagccctcatggaaaacctctactagggcaatgtggaggggaaatgtgggtttagagcccccacccagagtccctactgagacactgcctagtggagctctgagaagagggtcaccatcctccagaccccagaatggtagatccacagacagcttccactgtgtgccaggaaaagctgcagatactcaatgcaagcctgtgaaagcagccaggagaactataccctgcagagccacagaagtggagctgcccaatgccctgggagtctacccattgcatcgatgtggcctgggtgtgagacatgcagtaaaaggagattattttgaagctttaatatttaatgactgccctgctgggttttggacttgtttggggtcttatagcccctttgttttggtcaatttctccctttggaatgggagcatttacacatttacacctttacccccattgtatcttagaagtaagtaacttgtttttaaatcccttcaaaataacagatgctgcatcactagagcagcagcttagtagaagccagtgaatctatatcttctgtagcatgatgggcagcagcagccatctccacagcctctgtggccacaaccatatctgcatccttcatagccgcagccatagcccagtctgcagaagctgccacatccacagccgtagccatagcacatgccaccaaagcctccacagccatagcccagacctccacagtagctgccctagtagctcacggtgtcagagatagtgagttgggtttgctgtcccaggcaaggtcctgagtgtgaatatagcatgtttagggaacgcttatataccctgagcagaacatgtgataaacatgtggccatccttttgcagcatcccaatttatttatctactctatacaaataatcaatctgtttgttagcacaaggagagacacaaactcattaaaatctttgagctggcttagctgcatggttagaatgcccttgaacttattacattttttttttaagatggagtcttgctcttgtcacccaggctggagtgcaatgttgtgatttcagctcactataaactccacctcctgggttcaagtgattctcctgccccagcctcctgagtagctgggattacaggtgtctgccaccactctcagctaatttttatatttttagtagagacagggtttcaccatgttggccaggctggtctcgaactcctgacttcaggtgatccacacaccttggcttcccaaagtgctggcattacaggcttgcgccactgcgcccagctgatacattctttttaatgataaaatagtctgcatcttcaaagttacacaatttttaaaaaatcctaaattcttcatcactatgcatattgaattatttgtatttgacactgtgtttttattaaatgttttctcatttctcatttttacaccattccttagattgttctattttacctccacctagattcaaataaatcgatcaagtttaaaacttttaaatctagtaaagccttcaaatatcaaatatttttattgcgttgagaaattaaggctattcctccttcaaaagaaaaggaagtttttgaataaataaattttcttatcagctgtggtaaacacaaagtaatggaaaatatgtatgtagacataatataaaactactttaattttctatatcagcttgcaaaacattgttttggcttatcaatgtaacaaaatttattccagaaactgatatattatccaagagaataaactcagttttacaccagcctgaacagcagtcaaagatattctcttcaggtggggcacagtggctcacccctgtaattctggaggccaaggtgagaagatcacttgagatcaggtatattagtttgttttcacactgctgataaagacatacctgagactgggaagaaaaataggtttaattggacttacagttccacatggctctggaggcctcagaatcatggcaggaggtgaaaggtacttcttacatggtggcggcaagagaaaatgagaaagaagcaaaagcggaaacccctgataaacccatcggatctcatgagacttactcactatcatgagaataacaagggaaagaccagccctcatgattcaattacttccacctggatccctcccacaacacatgggaattctgggagatacaattcaagttgagattcggatggggacatggccaaactatatcaccaggagtttgagagtagcctgggcaacatagggagaccttgtctccaccaaaaaatcaaaaaatagccaggtgtgaggtgcacacctgtggttccagctactcgggaggcaaaggcaggaggattgtttgatccctgggaggtcaatgctgcagtgagccatgatcatgccactgcgctccagcctgggtaacagagtgaaactgtctaaaacagacacatacacacacacacacacacacacacacgaaaacaatcaagtctatttttatcgttacacaattttccagaactggctctaaataaagtattacctagaaactcagatgagcttggcttcatgctttacagataccacttttcttccacttcctactcttcctcactatgtatatatcagttctctttatcaaagcttttcattttatgctgcattcattcccaatatgtactagtgccaagcaggtatttcttcttatccatttttttctaatcagtattttacccttctacccatatatttaattttatcacaatatttttgtccttatgttttcttttccaattctgtgtgcctcatcttcctactttctctcaaccagcaaacataagacattatttatttattaaggttatacatttttaaacaatattttatatgactcttagagtcatataatacatctaacagtctcttaaaattctgatgccttgaaaatctcaaatgcgaatgtgcagtggtgaaataactgagataggaagcaaggatgtgaggagggctggccatgctccacagattttctgtgcttactctaggaagatagtaaatcaatcccaagtttagctccaccaaaatatgaccatatattggatttgggtccttaagcaatactttgctttacaagactttaaacattttgccaagagtattttttgttgttttgttttctgttttgctttgttttgaggtctataagcaacatttttgataatgcgttttctcaacttgatttgttcactattcttccaaaaaatttgttggataaatgaaagaatgaattttgcctgcctcaacatgtagtgcatatctaaggtggaatatgcactcaaaatggctttcaggttttaaatgaatatttaactcaatatttgccatggttgttttctcctttatcaaaattaattccacctttattttcgttctgaaaaagaaaactggacaatgtttaaattctcaatgagtagttgttgaagacaaacaataataagtaagtctaactactttaagaatctcatgaattattgggtaaacctgcaagattttctaaccctcatgaaaggctaatgtacattgctatttccgatgcatataaccatctccaagagaaatataatccaatagattttacaaattaaaggcaaattttattatttattacaaataaaatatatttaataaaatatgccctgcttttcttatgtattttcaaataacaaaataataagatatacttcattgtgatacacaaatacacacatatatatacatgcacatatatgatcatataatgctgtgaaagatatgaaccaaaacaatcaaatacttctgctttttttcctaattgaaaagtagaacaattatagtatcttttggatagcgattaactttggaaactgagaaatgtttatttttcaatttttttctcttaattcagtggactcaatgacttgcacaattatttctctgttatgctattttggggatatttttccaggaagatcatgagttaattgtgaaactcagatcctgtgttggtgtgtgaaataatgaaaataaagttttctactggccaaatgataactttgctatatcatgccatgactttgccatatcataccatgaagaccaagtaagataatagaaaagctagctgaaaaaattatctaaaatattttgagttaaatatgttaatccaatatgaaaaaaaattctatactaatttaatagttatgtacatcagttgttcaatgaaaatgtcaaataaattaatggacagaagagtatgatagggtgaggttataccaattacaataattcttggaaagaaaatacactttcataattaacctaggaatatcatttgatctgtcaccatttgcttgctcttacaataaaaagaaagaaattttgaatggatagaagaattcattacacattcagagtgagttgacaaatgtgatctgaattaaataaaacatatatgcttgatatataaatataaagacatgtttagtaggtattcctttttgttgttgacttaaatctgaatactatctaaataaaaggaaaatgttgaaaaatatcagattactaaccattttgcagttcttttcatttcaatctagaattattcttctttggagctatcgatgtatttatctatctgcatgcatgtttatgaggtatatgaaaaaacatagattctcaaccaaggagatagcttctctcattgacatcatcacttacgtataattgagtttcatgaacaaaacagaaccatattgtgtttgaaaatagaatgttttattggaagataaacagataattcaatcagctttaaaagcaaaagtagagaatactaggattattatagagatgtgggtatacagagaaaaaaaattgcctgaaattctgagatgttaaattcttttgtgcaaatagctccagcatgatctttgttgtccaatgattgaagtcagctctgggaaagtcctcttataatttcacacattgtgttgctggggcagtagtttaatagaatccagagaatccatatcctccatagtatgatgggcggtagcagccatatccgtagcctccgaagccagagccatatccatagcctccaaagccagagccatatccgtagcctccatagccacagccagaacccagtctgcggaagctgccacatccacagccatagccatagcccaggccaccaaagcctccacagccatagcccaggcctccatagtagctgccgtagtagctcatggtgtcaggggtagtgagtttggtttgctgctcaaggcaaggtcctgagtgtgaatgttgacatctgtgcaggcatgcttatataccctgacacatcacgtaacaaaacacttgctgcctattttagtgtagttgtgtatgttacacttacctgacccaatcctgacatctgaagaggccctcaaactcattaaagtgtttgagcttgcattgctgtcttctcatgctgtccctttaacatattgcatcacttttatgagaagaaattgctgtagcttcaaagtctgtgcataccagaccttaaatagacttcttcgtaggcatattgcattacatagttggtaatgctatgttttgaaattaaatattgcttcatctctggctttccttgaattgttttactcatttatgattaaataacagactttggttaaattcaatgctctgaaatttattatattcttccagaggtatctattacctcaggtgaggtccctttttaaagagaagcaaacatttgaaagactggagccatctgctcacctgctatgcctaacagtaaagaatttcatggggttaaaaaagttaaaataaagccatcattcttctattactctagaacattggccatcataaccaatattctctttttttggttttactcgtttaaaaaataaaaaccattttgatttaacaacacaacagtatattgctcaaacattaaagtcaaatcacagtaatcaaaaatctatttcctaagcagctttacaaactgttcaaaattgttttcacatcccgactcccttactggcatattagacatccaaggtgctaccaaaaatacagattgtattgccctcctcccattcattcctttttcctgatccacacaattatcctcttttcttttctttttttttttttttctgagacagaatctcgctctttcgcccaggctggagtgcagtggcgctgtctcggctcactgcaagctccaccacccgggttcacgccattctccggcctcagcctccggattagctgggactacaggcacccgccaccacgcccggctaatttttttttgtatttttagtagagacggggtttcaccgtgttagcccggatggtctcgatctcctgacctcgtgatccacccgtctcggcctcccacagtgctgggattacaggcatgagccacagcgcccggcctcctcttttcaatatattctttcagttcccattagggtctgggactaggtgagatggtgaaatatatgcaattctttttgcctcccatccattttcatttaatacttacttaaattcatatatatatataaataaaatcttcgatttttcagatatttttgcctttatgttacctttacctattgtgtgtttcttttttttcctaaaagaaaatagctaactaagctttactaagatgttaggtatttattaaagtgttagatgttaatagatgccatcgccaaagaccctggggaattcagtaagagactgttagcattgtgaatgtcttaggaatcccctaaaaatatgtataatataaaaagacaggatgaaggaaataataattaaagacaaagagtacctcagctgactctaagaatttagtcacctagacccaaggctgaccccaaaccccacccacatatgcccttaactttaagcttaaatatataatttcttgtttaatttttattactttgaatatactgttaagcttttgatgagtttataagcaattttgaaattgtgcatttctccagatagatttgctggctgcagttcaatgaccagcatgcaatagaaactcaatatataagtgttgaatagatgaatgaattctagttcttacaggtaaaaatcttacatctcatagaaatgaacaatactacgaatgtatccaacaataagaatttaaaagagaaattagctcaaatagctttctttctttagaggaacaaataacctatcatttcatttgctttttgttgctgttgtttaaggcatatttaaaaatacttaaatcttaagtatacaagttggtgatatttttcttatatttatagaccacctataacaagcacactctaattcccaaagtctggcgcttgactctaccagtcaatattattccttgtagagtaacaattaacatcctacataaggctttcttgttctgtacttcacttaggtggtctcatgtagtatactgaaacttcccatttccatccccaattcttctgtgtgtcactattaggtagatctctgtcgtatgtgatgtgaattttgttgttttaatttctgaaaagtagtctactacatgaatagagcacaactgatttatgattctgctctggtaggcctatatttgaggagtttagtggtttcagttttggtttggtttggttttttattgctagagtgaataaagaaagctgttggccaggcgcggtggctcacgcctgtaatcccagcactttcggaggccgaggcgggcggattacgcggtcaggagatcgagactatcctggctaacacggtgaaaccccgtctctactaaaaatacaaaaaattagccgggagtggtggagggtgcctgcagtcccagctactcgggaggctgaagcaggagaatcgcttgaacccgggaggtggagcttggaatgagcagagatcgcgccattgcactccagcctgggagacagagcaagactccatctcaaaaaaaaaaaaaagaaaaaaaaaagaaaagaaaagaaaagaaagttgttttgtacctttttataaagattcttttcttctttcttttcttttttttttttttcgagatggagtctcactctatcatgcaggctggagtgcagtggcgctatctcggctcattgcaacctctgtctgccaggttcaagcgatcctcctgcctctgcctcctgagtggctgggacttcaggcgtgcatcaccatgcccaaatacaaaataattttgtatttttagtagaacagggcttcaccacgttggccaggctggtctcaactccttacctcaagtgatccacccacctcagcctcccaaagtgctgggattataggagtgagccaccacacccagctaagatccttatttttagacctaggctttcctatacctttcttatagctgggataggaattgctaatttatatcatatctatacttattttatacattatatatcataaataacagttatatattatataatatatatttagcttccacagattctaccaatctcaagatgcagttattacatttaccagttgttaaatttactgtaccaacagggacgtatgagagttccagttgcttcacatccttacctacactaatcacttgcaaactctttaaaaaattgactatttttgtgaatacataatgatacctgattattgttttaatatggttttatttgattaataataatattcaacatctttacatatgcttataggccatttagattttttttgaagtaactgttgaagtattttgttcacttttaattgagctagtaatattttattattgattctcaggtgatctttacatatttgggcacaggatttttttcagatttatgtattaaaaatattttcattcactatgtagattttttcatcttaaaatggtgtctatacataaataaaatgcaataatatagtaaactcccattttaaaatctttttgttttatgtttaatgtttttggtcctaatttaaaaaattttgactacctctcacattgttatttaaaacttttgtctgttttctttaaaacttgttctatttttgtgatttttttaaaggcagttgatgatttgaatattacacttttgctaactcaggctaaagcaacataatcgcaaataaacaggtttcagatactgcctatttaagtctaccaaatatgcatctgttttggggcttatggtattgttgtaatgtattcttcctaagaaaagcaaagctattccctgaaagtaaagatattctggaatatttattttaaatccttcagcgatccataaaatcaataaattcaagttctaataatttgatcataccacagtgtactagaagtatcaaatgctttttctaagtagttaaattgattattatacttgttcctagctacagaaggcctttacctgtattgtgagaaaatgccactaacgatcaggaaaatggaagagctattatcatattctgtcaaactaagtagtgtagtcctcaaatggaatcaattgacccagtccatggagagtgttatgtactctcactagtctcactgaaagtgtgggtcttactagctggctgtataaacctattcttatgtttagtaaacaagtctgagtctttctaatgcttcttaattttttataccatttgaatttatcattatttactaataacttttatttagatctagatatgctagaaattaagaggttcaagattcatcaaaatcttaaataaaaagaggcatatactgtgaaaagtagactaatcttcaaaactcagctgtgattgttacacgaatataagaccagaattttaagattattgggaagcatcaagaaaagaaatatgcaatggaattgagagtcagcatttaaacaaatagacaaataaataaacagaagccatgtgtgccatttcaaattgagacaatttattgcaaagggaactaagcaattacacagttaggaaagtataggtagtggatgccagtagacacgatataggcaattataacataatgaatattcctaacatcttagatgctattttttttcatcttggattgatctagtgtgcccttgtttgactcaatatttggttaaattgaatgatcttcttatgacctctgatatcgtgtcctcagggtaggatttcagtagaattgagaatccatatcctccatagcatgatgggcggcagtagccatatccgttgcctccaaagccacagccataacccagtctgcggaagctgccacatccacagccatagccatagcctaggccaccaaagcctccacagccatagcccaggcctctgtaatagctgccatagtagctcatggcgtcaggagtggtgagttgtttggctgctcaaggcaagatcctaagtgtgaatggcagcacgtgtagagggaggcttatataccctgataagagtatgtgatgagtcacatgcgtacctgttttttttgtttttttgtttgtttgttgtgtgtgtgtctgtgtgtgtgttttaaattagttacttaacacaagtcattcatttttccctggcacaaggagaggccctcacaatcgttaaattgtttgagtttgctttgttgctgaattggagtggcccttaaaagttatcacaccacttaatgagaagaaattgctgtatctaaagtcttggcataccagatcctaaatagatttcttcatagctagacatattgcatattacaaatgaaataaaatgaaggttatatgttcctctaaagtcagatgctattggagctcatttctttgtcttctttattttgcccagactggtctcaagctactgggctcaagtgaccctcctccctcgacccccaaagtgctgagattagaggcataagccacctcacccagccttcatttcatctttaaatccctattgttcagatgtagccagagaattactcatgcctttgagaggcatagactttagaatttattcatcctttcagcatttatgtattgtgttgttactacaaggtaattattgcaaagaggcatgcaaattcagttgtgaaagcacaacatttggaaattacttataagactaaaaataactgatcactgtatttgagatcatataaggttaaaaagaacttaaaagctcaaagttgaaattaagggcacagctgaattaacaatatttggggtcacctgtggctgtatgtgactaaattcttggagtcaactgaggacttgcaccctcagttatttcttctgcctgttatcttgtaatattatacctacattttggagattctgaaaacatttctaatgttaatggtatcttattgaatttcaaagagcccttatatttaaattatctttttatatatcctataccttaataaacatttaacaacttagtggactagcatggtatttcctgagaagaaaaaggtgtatgtgtgtgtgtgtgtgtgtgtgtgtgtgtgtgtgtgtgtgtgtgtgtgatgaatttgatgaatttttgcatatgtgcttacactacctacaccaagcacactctaatctccaaaatgtttccattgttccattatggcaaatatcattccctagagataatcttctttccagtttttaacaacagcttcaaaagatcttgtcaatagtattctaaatttacagtctcatcagcaatgtagaaatgtatagtctcatgagcaatgtaagaaaattctagttgttccacatatttgataatgcttgtcatttttagactgtttaattctgactattcttgtgggcatttagtaatatccaagtattgatttaatttagtttttgcctgatgagtaatgatactgaccaccattttatatgtgtattggccatttagatattctctttttaaaagtacctgctcatgtatttcgtccatttttaagtgggtttgttatattctagcactgatttgtgggagctttttacatacttggatacaggtattttgtaaaagtttggttttgaaaatattttctgccaacatgtggtttgttttttcactttcaattaatgtttatatgtaaatagattatcttaatatcagataaaatttgttaatatttgtattttatgtttaatgcttttttgtcctaattgagaaacttttgattacctcacatcttattcttaatttctttgtcttgtcttttcagaacctgttccatttttatgaagcatcctaaatcaaaagacagtggctaacttgaatattaaattctcattatttcagttggaagctataaaatcacaaataaacaggtttaatgttatcacgctgcctattttgctctgtcagatctttgctcagttgcggggctaatgatcctatgatgcattttctctagaccaggcgacagcttttccttggaaggaaatgtattcttaaggtattcttttaatttcaacacaaatcaatacaatctaacaactagagatgtaataatatgatgaaattgcattaaactaaaagtggtactttctctagatggttatattaattgttcttcttttgacatagacagcctttcttcagactgtgatgccattgaccacttagggagtaaaaagttttcatgtgaaattctgtcatactcagtaaaactaaatagtacagccctgcaatgaagacactaagatatttttaccgagatctatttatggcaaaactgcaacatctcacttgaattgaatgaaagaattggtcatagcatctagctaagcaaatccatccataagttcagtaaacaagccagagtttttcaaatgcgttatgatttcttttaaatattaaaatattggatttgcactattaacaagttgtttttacacagataaagctacattagaaattgctaagttcaagattctacaacagagtgtttacaaatgaaattaaatagaggtggtcatttggccatgacaattaaactcttcagacgcacatgaacagagccttcgagatgcttcatgtgacaacacacaagaagagaagtaaaaaatgaatggaacagtgagcatggggaagtagaatgcctgatactcagtaaaactgggttctggtctgggctctccttgtcatgccatttttgatccttagcaaatgatttcactttttggagatcttttcccattcaagatggtattagggtaagcactgggaaaactttatagtagttcccctgcatgctccacagttcttttatattattttcctggcatttttgaatttgcttgactccaactaaagacattcgcttttatttcagtactgaaatatattattcttgaaacataataatatgttattgcatatttttcatgggcaagatacttatctgaaataccaacacgaaaaggcccacatttgcttgttaaaggttaaaagagacttggctagagtgtataaagcttcaggtcaatcacagccttaatatgaattacttcacaagtgatggcaatgatttctatatttcctaggtgtgttgcaaaatataaatgtgctgataatatgaaaatacaacttcgtgtcacaccacaatggaccaggaataaaacatgatagaaagtcacaaaagggctgggcgcggtggctcacgcctgtcaacccagcactttgggaggttgaggcgggcggttcaccaggtcaggcgatcgagaccatcctggctaacatggtgaaaccccttctctactaaaaatacaaaaaattggccaggcgtggtggcgggtgcctgtaatcccagctacttgggaggccttggcaggagaatggcgtgaacctgggaggtggagcttgcagtgagccgagattgcaccactgcactccagcctgggtgacagagcaagactccatctcaaaaaaaaaaaaaagtcacaaaaataagttctttttcagtgtatattcagatatatactttgttttatcagcacttttcttaccattaaaggggccatataaacatacattttgaacaaactatagaaatacatactcttcatgttggtctccagttaaatgtgaaagtttatgaagttggtatttcaaggctgaatttaaacactaacatgatctcactgaaagcattgaaatgaaaaagatatggtgaatatggcgcagtgttccaaagaaaaagccttctttttaattgagtgttatggttttcatttgtgcatgtacagtttacctttggacaacatgggcttggactgagtgaatccactcatactgagattttgttctacctctgccactcctgagatagcaagaccatcgtccccgttcctcctcctcctcagcctattcaatgtgaagacaatgaggataaagacctttatgatgagtcgcttccacttaacaaacagtaaatataaattctcttccttattattttcataacattttcttttctcttatttactttattgtaagaatacagtatataatgcatataaaacacaaagtatgtgttaatcaactgtttatgttatcagtgaggcttccagtcaacagtcggctaccagtagttaggtttctggagagtcaaaagttatatgtggattttcaactgcatgggggaatcagtactgctaacccctacattattcaagggtcaactgtgacctttgaatgtgaatatatacatgcacacacatacatacagctatatagataggtgcatgtatatacaaaattattttgttatatataatatacttctatatgtatagtagtttgttcttttttcactggatataattacaaataaccactttgccattttgagtcaagcaaaaaacaaaagtcgtgtatttgctttcagttagcataatttattctaaaaggaacagagaaaccccacagttataaaggtacaagtaagacacatccagagacataaagcaaagaattatggaatgataggtattcttaaacctcttagatgctaactgctcttgatcttggcttgatccagggtgacctcgtttgtttgttattgcagtcaggtttgggtgatcttcttatgtcccctcatgttaggttgtcagggaaggatttcaataaaatccagagaatccatatcctccatagcatgatggacggcagctgcggtatccatagcctccgaagccagagccgtatccgtagcctccgtagccaccgccatagcccagtctgcggaagctgccacatccacagccatagccatagcccaggtcatcgaagcctccgtagccgtagcccaggcctccatagtagttgccgtagtagttcatggtgtcaggagtggtgagttggtatgctgctcaaggcaagatcctgagtgtgaacaccagcatgtgtaggaggcttatataccctggtcagagcgtgtgatgagtcatctgtataccctcctttgctatagttatttgtattacgtttgatgttacaactcatttatctattgtcttctgatgtagggagatgccctcattctcattaaaatatttcagcttacttaatgtcttattcaggacacgattgaacttactgctttgcttttatgaaaagaaagggcttactgttcaaaatatgcacattccaaatgctcaacagaattgcctattaccaggtgtattacatcatctacactttatggtattccttttataatgaataatttcctttgtccgtcatcttccaaactgataacttcatattcaactaaatttacagctgttttttcaatttacagatgttaaatctatagttttaaaaagcaaacttatttatcaaggtgaggtcttcagaaagtgcctatatgcacaatacaggaaaacatttgaaatcaaaatgattttaatgccctgctgtgtacaatcgccaaaggactcaaaaaaagagagtgtatgctgatttttagcattttattcacaataacttttatactatttttgactttgcacaccagcttcagaaccttttggttgcaaaatacataagaattaatttcagaaattgagggcacaaaatccatctcctacgcagacttatcagagtagcactttagttttccattcaagtcctaaaactctcctttataattggttttattcaaagtcctggtaaaattgcagattgcatctgcctctgttttgcacattctagtcaattactttctttctttatcatttttcagtagtgtatatatgacctctatttcctttctcatttcagcttttattcttcttcccattttcttaatgtctatagaaacagccaggtagaagtttattgcatacattccctctgtcttccatcgacttatctcaacgcttttttttttctatctcctctttgtattcactgtaacatctttcctgatttttttgtttgtttgttttttgagacggagtctcactctgtcgcccagtctggagtgcagtggcaccatctcggcttactacaagctccgcctcccgggttcacgccattctcctgcctcaacctccccagtagctgggactacaggcgcccgccaccacgcctggctattttttttggatttttagtacagacggggtttcaccatgttagccagaatggtcttgatctcctgatctcgtgatctgcccgcctcggccccgcaaagtgctaggattacaggcgtgattctgatgttcttctatgtctatcctgtactcatttattctgaggtaatttctaaccactgcctactgatctgttaatagttcattaaaatatcatttttaaagctttctattttttgtacttactaaacatcctcaactccccaccccagcaaaaatacttagaaataatgaataagacctactatttgatagcacaatagagtgactatagtcaataacaacttaattgtacattttaaaatgtcttgagtaaaattagactgtttgttaactcaacagataaatacttgaggggatgggttttttaaaatgtactccaactcctatggctttctgaaatttaaaaggtatcctaaaatagaaattgtcttcaaagttttcaaaataaaggcaccatggtgaaatggcacagaatagagaaacatatgtaaagaaatttgccctgggcttcatagagttcctcagctgactttgttgaattagtgaaacagatacaacattgagaccactcttgattaatctccatgcagcacctgtctcttggcttcgacaactaaaaattcatttaatttacatgactttgaacatgctggtgagtttttgtgagatttataagtattttatcaaacataaatttcctaaaaggaatgcttcagttcttctaagcaacagactagggaattaaaaattgtttattgaagaaattctaagtaaattgacagtaactgccacagcaaccacaatctgtgcacaaccctgactacgccttagtgagctacctttttaagacagaaaaatagctcaataagtctttccatttatagagtaggatttaatccaatatttgctacatttcttttatccaaatattggttcattcttatttctcatctgaacttgaaacagtcaataagctgagttctcagtgagtccttttgaagccataaaatcacaaataactcaaaatcacaaataactatattaaggataccacagtttgtccatataaatcagcctgataatgtaagagtgtttaatagctaatttttgtttgggatgcataaacaatgcatacatctgagatataaaaccaaacaagatataaatggaaaacctcaatagccaaataagaattagaatgttttaaagaaatagactatgtgataattttccacaagaccaattaatgatcgtaagcagtaaatgattaatactaaaataaaatatataaatctacatattttatatacaaaatatatagaacaaatattttgtccttttttcgaagtgaacaaatagtaaaatgaaagcatccattgtaaaatgaagacatatattcatttgtagtgatattggttttatgctgaaagagattgttagactcaaagtcgattagacccaaagttgatagaacaatgatgttttatattttctccttcttttcacttttaggaagtttactttggaatatatgcttaataactttatgataatggataaggaagaagaaaatatgttcttacttgggataagtagtaacttttacctggaaagaaagaaagcttttgttataaattccaaagacttcgtttaactcagacacaaactaataatatataaaaatgtaagttacaaaaatatgttaatattgaattataccagcaatgccacaagtgctttttctcattataattatactgatctttcttttaattgcaaatttttaatacttttactcaggctgggaggatatttacctgtatgagaatagagcagtttcatctgaaattcagttatagggtcaaaattcctttaatgaaattaccaaaatttatctaccttgccctcccctgtgaaggtacagcatctaaagagagaaataacaagatttgtctgagttgtttgttcatatttcatctttacattgcataaacaaacccaagtatttctcataaaaataaataatcttgagaattgagcttatttgttctgtttttgccttcaagtaaagctaagttagcaattcagaaatgtattatatataacaaaataaaagttaacaagaaaaattttaaaaacaacagcaacaaaacatagttaatctaagagatgaaattagtctccatatactctgctccaaaattgaaaccatccacagtattattacaagaactttccagatggcattcagatttggaattatgcagtgaaagagactcagaatgatggactagagcattaggttcaggtgaactgctttctggtcttgattctgacacttagattttaactctaggcatcacttaactgttcggcatttcctcacctgtactatagggggcagcacggtacaatctgtaataatctaacgtttggtccagctctcacttcttttgtccttgtattattgaatttccccaggaaggggtccagtttcagtttctgcaaatggctagccagttttccaagcatcatttattaaatagggaatcctttccccattgcttgtttttgtcaggtttgttgaagatcagatggttgtagatgtgtggtgttatttctgaggtctgggttttgttctattagtgtgtatatctgttttggtaccagtaccatgctattttggttgctgtagccttgtagtatagtttaaagtcaggtagcgtgatgtctccagctttgttctttttgcttaggattgtcttagctatgcaggctcatttctggttccatatgaagcttaaagtagttttttccaattctgctgagaaagtcaatggtagcttgatgggaatagcattgaatctataagttactttgggcagtatggctattttcatgatattgatacttcctatcatgagcatggaatgtttttccatttctttgtgtcctctcttgtttccttgagtactggtttgtagttttccttgaagaggtccttcacgtcccttgtaagttgtaatcctagctattttcttcattttgtagcagttgtgaatgggatttcatttacgatttggctctctgcttgtctgttgttggtgtataggaatgcttgtgatttttgcacaatgattttcgatcttgagactttgctaaagttgtttatcagcttaaggagttttggggctgagacgatggggttttctaaatacagaatcatgtcatttgcaaagagagacaatttgacttcctctattcctatttaagtagcctttatttctttatcttgcctgattgccctggccagaacttccaatactatgtcaaataggagcagtgagagagggcatccttgttttgtgctggttttcaaagggaattcttccagcttttgtccattcagtatgatattggctatgggtatctcacaaatagctcttattattttgagatatgttccatcaatacctagtttgttaagagtttttaacatgaagggatgttgaattttatcgaagactttttctacatctattgagataatcatgtggtttttgtcattggttctgtttatgtgacagattacgtttattgacttgcatatggtgaaccagccttgcatcccatggatgaagccgacttgatcatggtggataagctttttgatgtgctgctagattcagtttgccagtattttgttgaggatttttgcatcgatgttcatcagggataatggcctgaaattttttttttttgttatgtctctgccaggtttggtatcgggatgctgctggcctcataaaatgagttatggaggagtctttctttttctattgtttggaataatttcagaaggaatggaaccagctcttctctgtacctcttgtagaatttggctgtgaatccatctggttctgggctttttttggttggtagactattaattactgccgcaatttcagaagttgttattggtcttttcagggatttaacttcttcctagttaagttttgagagcatgtgtgtgtataggaatatatccatttcttctagattttttagtttatttgtgtagaggtttttattgtattctctgattgcagtttgtatttatgtgagatcagtggtgatatcccctttatcattttttattgtgtcgatttgattcttctctcttttcttctttattagtctagctagtggaatatctaatttgttaattttttttcaaaaaaccagctcctggattcattgatttttttcatgggatttttgtgtctctatctccttcagttctgctctgatcttagttatttcttgtcttctggtagcttttaaattggtttgctcttgcttctaagttatttgcctagcaggaaacataggcaataccattcaggacagagacatgggcaaaaacttcatgactaaaacaccaaaagcaattgcaaccaaagccaaacttgacaaacggggtatagttaaactaaagagtttcctcacagcaaaagaaactagaatcagagtgaacaggcagtgggagaaattttttgcagtctacccatctgacaaatgtctaatatccataatctacaagtaacttaaacaaatttacgagaaaaaaacaaacaaccccatcaagaagtgggcaaaggatatgaacagacacttctccaaagaagacatttatgcggccaacaaacatatgaaaaaaagctcatcatcacttatcattagagaaatgcgtataaaaatcattatgagataccacctcccacctgtcaaaatggcgattattaaaaaatcaggaaacaatagatgctggcgagagtgtggagaaataggaacactttcacactgttggtgggagtgtaaattatttcaaccattgtggagaacagtgtggtgattcctgaaggatctagaaccagtaataccatttgacccagcaaccccattactgggtgtatacccaaaggattataaatcattctactataaagacacatgcacacgtatgtttattgcagcactacttaatagcaaagacttggaaccaatccaaatgcccatcaatgatagactggatgaagaaaatgtggtacatataaaccatagaatattatgcagccataaaaaataatgagatcatgtcctttccagcgacatggatgaagccgaaagccattattctcagcaaactaacacaggagcagaaaaccaaacactgcattgttctcactcacaagtgggggttgaacaatgagaacacatggacacagggagggaagcaacacacacgggggcctgtcagggggtgggaggaaaggggagggatagcattaggacaaatacctaatgcatgtgggatttaagacctagatgacaggttgataggtgccacaaaccactatggcatatgtatacctatgttataatcctgcacattctgcacatatatcctggaacttaaagtaaaatttttaaaaaaaagaaagaattgctttctggtgaatggtaattgatttaaaatctactttaccaaaacaaaacaaaacaataagtcttttggatgaatgatgactgtcatcaattaaagctgcaaagtgcagagggacccatttcttgattatatccagccatttattttccatttgcaattgtaaaaagctttagtgtcatgaggatgatgatgattgtaaaaagaaagcatatcattgaatgccacagaggaactgtgacataaaaaaactaattaaaacaattatttttaatactacatatattttaatcacctaatttgaaaaacttttagtaactttataacacaaccattttcatgataattctaagttaaatgacaggcaatagagaatagatcaaagaagattatatagaatcaagaaagccatgaaacatatattttctttcctggaagcttagagaaatattttgttctagcactcttcctttcttaccacaaaagggctgaataagcaacacattttgaaagaagaaatggattacttatatatttggactgcattgataaatataattgtatagaattaaaaccatgtaaatcccttttatttattaccataaacatatagttccaaaatgttggagttgaattttttattgttgttgagtttaaatctaaaaattatctaattaaaagctaggaaataaaaatcacttatatttggccaggcatggtggctcacacctttaatcccagcacttttggaggccgaagtgggtggatcagttgaggccaggagctcaagaccagcctggctaacatggtgaaaccccatctctacagcaaaaatacaaaaattagccaactgtggtggcacatgcctgtagtcccagctactaggaaggctgaggcatgagaattgcttgaaacttgaaggcgggggctgcagtgagctgagatcgcaccactgcactctgtagcctggacaacagagtgacactctccaaaaaaattacatatattcaaggaatcatcattcaactcagtctaaagttactgtccttttcatatatctatcattgtgtgaaataaatatttaatacacagatagtgttttagttttcacattgaaagttgagtagtatttatacttagtaacatatataattgagccaaatgaattaaacaaaagctatatttgctgtgtctcgagagacttcattaaagaaatccaggagaaaagatggagacaaacttgtacaattataaatgtactgaaagtcttaggtgctaattaatttaaacaaacagacttggcataattttgaaaggtaggtccaatgattgaaatcaggcttatcaagttcactcagggaatcagatgttagattgataaggaagaattttaatagaagctaaagaatccatgtcttccctaacaggatgagtggctgcagccgtatctatagcctccattgccacagctataccctggtttacagtgctaccacatctacagccatagccacatcccagaccaccaaagcctccacagccttagcccagacctctgtaatagttaccttagtaattcacgaggttaggagttaaaggcttggtttgctattgatggtgtgctttctaagtatgaatctccacacctgtgcagaggttttatatcctatgttatggatgtagtaaattattcagatttacctcattttcattactcaggagaaattacatgaaacacatattactggctctctgttttgtttagcatgcatggaattactttccattgcaatataacttttaaattaatttctagttcaattatgatttccctgattaaattgtatctataatgagaaatgttatttgcaatttcaaagactattcttacatcaggacacacataatctccacctaatgtaggcttccgagcatctctataatccagttgagcagctgtatgacatcgtcatcaaggtgatacttctttcctgcatatgctttctgtaatttctcatgttcatgactatgccttatcatttgagataagcagggccctaattttaccttaaatccatgcctctttcaaaactgtaatcacttaaatgtcaggtagttataatattaatatacaaacaaattttacttgacttctgtgcagtttgagtccacatggaagccatcttgttaaaagtgtctctcatgttttttataccagattaaatatatatttttctttgttaagggtttacacatgataccaatgggcatttgatattccacagcctggtatccacatttcatttttgagaacatactgtataataacttgggatgtatttgaagttttcccgggaagagatcaccacgcagcattaagataattagggtgatataaaaagtcacaaaacatttcatgttctgactttattctattatctcaattttggattctattgagatatatcaaaattctagttagaagcacaattccaagtcaaccaaaacattagtgctggccctaccccgggcaagactaatacaacagaatataaactagcctgattttctaaagtctttactaatgccaaataagataggaattaaatgttttctactgctttctgcagcaaaatacactcaaactgcatggaaggagtcaacaaattcctcaaaataaaagttaactaaaactaacacaagtagaaataaagaattgtaaagtgctacatctctttaaaaaattaaatttatgtaaaaacaagaaaggcaggccaggtatggtggcttgcctctgtaatcacagcactttgggaggccaaggcaggtggatcacttgaggtccagagtctgagaccagcctgaccaacatggtgaaacctgtctctactaaaacatacaaaaattagctgagtgcggtggcacacatctgtaaacccagctatgcgggaggctgaggtagaagaatgggaaataatgcccctgggaggcagaggtttcagtgagccatgatcaggccactgagctccagcctgggtgacagagcgagtgagataccatctcaaaaaataaaaataaaaataaaaaagaaaggcagacttctaacaaagaaaactgcaggtcaacatggtgaattctagcaacggttttaaaagaaatagtagtattttatacagttttttcctcaatctacaaattcaagatgcaataataaatgaaaaattggaaaataaaatgcaaaaatattagcaatattttcagacaacataaaatacaggtaaaagtaacaaagacatattccttgataattacaaattaatgcttgaagaaattcataagaactgttaaaatgagggtatatcatgtctacgtattgacaacagactaaatattcccaaattatatatttagcaaaatcataatcaaactgcctgtatatttacaaaatattctaaaatgtataaagaaatccaaaggacatagaatacacaatgcaatctttaaaaaataacaaagtttgacaacttatattaactgatgtcaagactgattatactagaatcatcaagagagtgcagtattgatgtgaggatacataaatagatcgatgggaaaaattagagtctagaaatagaccttttttctacaaagactctaaagcaaaaaaaaagactccatcaaatggtgctgaaacaatggaatattaacatggaacaaggaaataaatagccttaataactacttaatactatacacagaaattaatttaaaatgttttatagatctaagcatgatagctaaactactaaagcttctagaattttataggacagtgaaggcactggctatgaaataaaacatagtgaaattaattttattaacagtaaacagattaggagaatcaaaaactaagaatatatacattgatatagatatagatacaaatatcacctgtaaagatctgctactacctaaatgtcaacagaaaagcatcccaatgatttgggctcattgaaagcaagatgtgcaaatagccaataaataaaaagtgttaacatcattaggtatcagaattattaggaaaatgtgaattaaaaccacatttttaattccaagcacggtggctcacgcctgtgatcccagcgctttgggaggccgaggcgggaagatcagatggtcaggagttcaagaccagcttggccaacgtggtaaaaccctgtctctaccaaaaaaaaaaaaaaaaaaaaattagccaggcatggtggcgtgtgcctgtaatcccagctacttgggaggcaggagaattgcttgaacctgggatgcggagattgcagtgagctgagaacgcaacagtgcactccagcctgggcaacagtgtaagactcttgtcacactcacacaataacaaaaaaagaaccacagttggataacactactcacacattagaagtgctaaaatgaaaaacaaagtatattttttctaattaataagctatgatttagattaatcgtgatttatataaaatttcccaacaggttaatttcaaaatgtttctaacatgcattagtgcaattttcaactcatttaccatggtaatgcctgaattgaaattatgactttctgttagatttccaaaagagtaaatccaaggttttgatacatagcatagtacttcaatacattctgttaacatgcttcatttaaagcaataaaacagtgaaaaataacaagagtccatggaaaaggaaagcagtccccaaaagtgctggctaatgagcagattacattatcctcaccctacgaatgactcacaaggcagctagtcaaaacagaatcaatagtagggaatgtgtgatagggttagtagactctggttttgtgatataatatgaagcttcacatagctccttgatataaatttcccttaagtcattcagaataatggatgtaaccagaggccaagtgaccaaataaagttgtgatcaagactatttattattccaatccagggactttagcacctaaatattattgccataaattagagttcacaccaacataaattttgattaagaactcaaagtcatttaagtcatatttattgtcaaataagtaccttcagtgaagattgataagcctccttgggactggaaatccgggagaaggagactagcaactgggagagaccagttatgtctctccttcaaactcaatctatgatatttgttttttgttcatttaacaataggaataaatggtatccttgagaagaaaaacagttgccttcatttcaaatatcataaaataggagaaacttattaagatatatgactaaagttaagaccatattgcaatgtcacattaaacacatctattggaaaataattatagaggcatttcccaatgtaaaatacaccacagaaaatccagatgaaaaattagtacctttgagaatgaaaggagaaataactgttgtaggaaaatatccagtatttatagagtaaatacaaattgctattgaacagctagatatacacagacagctcttgaatcttatgccaacaagcttgtaaagccagtaattcatcttccctgcctgctatgagcgggggatatatttgaaaggacacaacatttgaagagttgtattttgttattggatcattttcccaagaatcttaggtcccaactccgagtagaaagcagaggcccagtatcttccataacaatctgggtggcagcattgtatccataaccaccatacccagagtcatatccatatcctgctctgcagaatctgccacatccacagacattgcaatagcactgggcatcaaagtcaccaaagccagaccccagcctccaacatcgatgccagaatagcccgttgtttagagttgaagtctgatattaaaagatacttaaacatctttagtgatagtgtgacaagtcttagatactctctatataacatttttaccaaagtgtacacatgaaacaatctcagtgatttgtttctccttatttaaggaggaggcctcatgtctattaaacccttggcttgctttggcagaacaattaatacttcccaactagtgctcttaaattttattactatttataacatactcattgtgagttcagatgttgtatttttcatgtctttgaggggcgcatgatatcatgctttaaaatgttattttgaattttttttctctgatggaatatcttaagcatgtatgaaaaagcagatggctagaatagcaagctgtggtaactctgaatttacgtactggtatattttgtgctcacagcacaaatgatattgtgattttacttttagaaaaaaaattccttagtgtcaatttaacacccatttcaaactcattcgtcttctctacctttcttcattgattatatcatgttttgttgtgggtatttgagacatgtcagcatctactacttctctctaaacaccagataagtagatctagtagagtgtgtattggatttctcatttatgcacagactgcctacaacctaaagtatgtattcaatatgtctttctgagtgaatgaatgtgatttatttgatttgattatatagagaattcccctccctcttatccacagggtatatgttccaagatccccagtggatgcctgaaatcacagataatactgaaatctatataccctatgtttcttttcctatacatgcaaacttatgataaagtttaattgataaattaggcatagtgagagattaacaacaataactaacaataaaatagaacaattgtagcaatatgccagcatcaggattcttgcactttggggatattatgaagtaaagtaagagtcacttgaatgcaagcactgtgatacgcccacagttggtctcttcattgaaagagctcttgagtaactaacaggcagggagtgtctacagcctggatcccctggacagaggattcctgtcctgggctggatggagcaggactgcacaagatttcatcatgctacttagattggcaggcaatttaaaacttatgaattgtttatttctgtgatttcccatttaatattttcagctatagttgatgtcaagtaactgaaaccaaagaaggcaaaactgcagataaagagggacacctgttcacaattctacatcaccatgacaatgtatttggcactctgagaggtagggtgtattaattggttttcatgctgccaataaacacatacccgaggctgggcaatttacaaaagaaagaggtttaatggacttaacagttctacgtggctggggaggtctcacaaacatggcagaaggtaaaaggcacatctcacatggcagcagatcagaaaagaaagctggtgcagggaaattcccctttttaaaacgttcagatctcctgagacttattcactatcacaagaacagctcaggaaagacctgcccccatgattcaattacctcccaccaggtccctcccacaacacatgggatttcaagatgagatttgggtggggacacagccaaatcatatcacaggggtttctgcttttcatctagaagttcactaatgctctgctttggaaaagtctaactttctttctctgatgctttgatatggtttggctgtgtctccacccaaatcttattttgaattgtagctcccataattcccatgtttcgtggcagagaccaagtaggaggtaattgaatcatgggggtgggcctttcccatgctgttcacgtggtagtgaataagtctcatgagatctgatggttttatgaaaggaagttcccctgcacaagctctcttgcctgccgccacgtaagacatccgtttgctcttccttcatcttccgccatgattttgaggtctccccagccatgtggaactgtgaatccattaaacctctttcctttgtaaataacacagtcttgggtatgtctttactgacagcatgagaatggactaatacacattgctagattagtaagccttcgtccaaatgcaagagcttatgtcttctttcctactctttaagcttctaacttcctaaggaagaacgttttctttaacaaagtttctctaactctgctaagaatgcaccaaaactggaattcttttagtgccacaatttttctatttaccctcatttaacactgaaaagaaggatcacctgaaacctgaagtgtatttgtaagagtcaatattaatattacttgtattccaaacacatgaaatgtttagcactcttaatctgtaactcttttgaaaaattaagttctatcaaataagcaaagtccaaatattccttggaatatcttgcctcaatcacttgaaagagtgatgtccaaggaagtaactctgggggaaaaaaaaatcccactccaaatgggaaatttaattttctaattgggaatgttctttatttttcatcagtggggagaggggtgaacttatgatttcattaaaagctttaatgaaacatcactacagagatggaatcaataactacatattagtaatttaagggttctgagataaatatgagttttgactataggatccacaatcatgctgttcactctgttgcgactgcagctgttgccactcctagttcttgtggaattttccaattagggttatgtaggcttttacagaatccaaaaagaacttactagaaaaccccttagattaaaggatctagaaattgagctttctgtttctagggtcaagaaacatgaacaaatttttcagtagaagtcaaatccacatctcctgaagccagaacaatagccaagacctccttagctagagcctaagcatcagatgctcccacactacagcaagtaccagagtccaggcctttcttgcctaagcccaggcctccaaagaaagtagtccatagtgtcacaagatctgtgagtgtggttgaaggttgtctaagttcctctgcatgtgaactaacacctgcagagttgctttgatagtccctcagtggtagatgtggcaaaccacactaatttacttcaagtttattcaagactgttgtaatatagaaatccaattagactattttcttaattagaagagactcaaataaggaagcttaaatttttaatttaattttcctactgagcttgctttccaccaaacctattatgcccataatgagtaaagttgatggactttgcaaagtcaaccatgacttaattctccaggaaattccacgtgagtcttcagggcatcaggtagccctctaattacatcacctgaggtgtggctcccaattcagtttatttccttgaccacttatttttctctagatcaaatgaagtgcattatttctctcttttcaatttctaagacacatctgaggtctattattccttaaagttgcaatgctatataatgtgcttcattgatatggcatttaatgtaacaagttttctgttgttcaaattttgtaaaacagctcatgttgcattttaacattatgtcctgaatcttgttttaatctttgggtaaaagtattttacgggtgggaattttgagcttcaaattctagtaggcaagcaataagactagtatttatttaatatttatgatttatgttcgagtaaaatcaagaaatagcacattttcatattcttctgtcaatgatacttccatttcttatattaaagagtagtaaaaaagtaaattgtttcttccaaaatattctttagatttacaagtttaaaacacttttataattttgctatgttttatttggttattgaagcaaaatatactttattatttcatttatagtttatttactaaaagatattattttcttcctccctttttctattctcccttctttcttccatcctttctctcaactttgttctaatgccatttacatacacatgtacatacatatacacacatatatatatgtatatatatacaataaaaggtgaatcatacctggttcttctgttacagagtttactattattaaaatcagtaggaaataaagtatgtgtgttataattcaatattgtcaaagttgtggtagaatctaaaaatctaaatatttaagagagctgaaggtggagcagctagggtgcccagccatcctggttttgctgggactgtgccagtttgagcaccggctatatcaagtgctggaaagattttcagcccaagtaaactgggatgattagtcacccaagaagtaactcatacatgaggcagtcaacccagaaaacttcctatgaacccaattatgaatgcattagatctttcaggaagaatgaataagaatgtaacaggttgggggtaaaaaaggaaaaatgacctttcataataagagaaaaagtaagtgtcatactgtggagccatgaaagtatgtagaatagagttaaataatgatagaatacagagtgtgtgagaaattagcataagatgaggcaaaaaaaaaggtcagatttttaaaaatttgtatgtccattaattttttctaattttatcatctaggtttgaagtcagcaaactatagccagagagtcaaatcctgccagtccctataattatgaatacagttttattgaaacacaggcatgctctttatttgtacatcatctatgactgctttcttactacaacagtataattgaatagttttgctggagaatatttggccagaaattctaaaacatttactgcccggccctttacagaaaaagtttgccagactcttactgcaggtaatcagaaagccctcagaggtatcctaggagaagtacataatcaatcttaccaagtcttctttatttaagtaaagaaacttctaatatcccagcaggtcatctactcaatatgtaattaatcagaatatgaattacttgactttttatcctttaagtgagattcatccttgaaataacttattgtcttcaatgtttccactttgtaactcttttcatacctctgtaaaatgcttaaaagagaggtcagagttggtaggtaatgggaaaaataagtagcctcgatatattaaaagagatttggcaatttgtttgtttgtataggcctaggggaaatagaggtaatgtaataatatacccaagtctgtaatatggaaccaacatgaatgagaactcatgtgaacaaaggaaattttgggaaaaaagcatctcaatagtttttcaaaattaactgttgtggaaaaaagcctctgagtatccaaacccagtgtgagttctattttattccccaaaggagcaactgagtccatctgtataaaatgacccactgtgagtttctgtgcttttgggggcatggcttaagaaggagctcattttgaagacagaatttggaaacaaatttttagcaaacaggaaagatgaagaatttaacgtgtatcagatattttcacttgacatttatcaggaaaatctccttactttaactcacagtgaacacaaaaatgagaggaacaacgaattattccttgtgacatggaaatcttcctttgaatcagttaagaatagcagtgaagggctgggcgcggtggctcacgcctgtaatcccagcactttgggaggcggaggctggcggatcacgaggtcaggagatcgaggccatcctggctaacatggtgaaaccctgtctctactaaaaaatacaaaaaattagccaggtgtggcggcaggcgcctgtagtcccagctactcgggaggctgaggcaggagaatggcatgaacccgggaggcagagcttgcagtgagccgagatcgcaccactgcatttcagcctgggcgacacggagagaatccaactcaaaaaaaaaaaaaaaaaaaaaaagaataacagtgaaattaaagaccatttgattttctaatcatctccagtatacacattgagattggtatgggcatagtctatgtaaccatctgaattgaatttttcagagaagcctaaattataaatattatgtatacctcatttgaggcctgattaaagaataatatagccacatgatgactctctaaagaaaattctatagatagcacaggatgcaaaagaaaaaactccctttcttccagttgattataatttagtaagggagatacatgagtataacctcatctaatgaaggaaaactgtaataagtgttcttgaaaaagcagtggattcaaacagaaggaaataattaattcaatcaacaaatggctacaggaggactcatgaaatagctaggacttgaaactcccctcatttgcaaagtttctaaggtcaacattccacctattaagggagattatctcacatttcacaaacagatacttttgttacatctatattccatcctgagattctcataacttcctaaacatttgtgaatgtttttgtaagtggtattttttcctcttaatttcaaatgtcaattgtttattgaggttaatggcaaatatatatgcacacatttgtatgaaagcaattgactttaatatatgggacttgtatcctgtaatttttctctgctcacttactactctcaagagtttcttctgtagattattttgggttagatatactagacaatcagatcatctgtaagtaaagacagttttatatcttcctttctgatctgtatatcttactgcagtagctaaaaccaccaacatgatgttgaattagaatgataagaaaggacatacttgctttgttcacatcttaaagatgaagtatgtagtttctcctgattaattagctgtagtttttttaactttatcaagttgaagaagttatccttaattctcagtttgagaaaagtttttgacataatagggaatcatatctttaaacaacttttctgcatctgctgatataatctaattttttcccttttagcttgttaatatggtgggtcacattttcaaatattgaatcaggcttgcatgcataagtgaatcctatctggtcataagattatttttaaagattgttaaattagagttgccattatttgattgggatttttacaacaaatatcagagacaatgttctgtaattttcttttttgctaacgtctttgattttgataatggaacaatattgtcctaatagaataaatttgtaggtgttctctttgcttctattttctggaagtctggaagtcattatgaagaattggtatttttttgttgttgttgttgtatgttttgtagaattcccagtgaaatcagggaggtactggaccaagtgcttattttcagaaggttttcaattattagttgagttacatatatatatatatatacacacacacacacatatatatatatatacatatatatatataatctattcctttcatgtgagttttggtagtttgtggcttaaaggaattcatccattttatttaagttattaaatttgtgagcatagattaaaaagaaaagattacatcttttgcaggaacatggatggagtggaggccattatccttagcaaactaacgcaggaacagaaaatcaaataccacatgttctcactaataagtgggagctaactgatgaaaactcataaacacaaagaagggaacaacagacactggtgcctctttgaaggtgaagaatgggaggagggagaggagtagaaaaaaactggttacctggtttagtaccttggtgacaaaataatctgtacaacaaacctctgtgatatgagtttacctgtgtaacaaacctgcactgtacccctgaatctaaaataaaaggtaaaaataaataaatttgtgggtatagaattgtttttaagtttcttattattcttttaatgtctataggattagtggtaatgacacctgtttcatttctaatattagtcatttttttcttaatgttttttcttgtctggcctgaccagaggcctagcaattattgatcttttccaagaaacagcttttggatttgttgattttttcctattgttattctgtttacaagtttagtgatatctgctttagggttaaattgttctttttctagtttactaaggtagactgaagttattgattgtaaggtttattttttttcttttttgataaatacatataatgctttacatttctaagtactacttttgctacatccacattttaacaagttccactgtcttttttcatttgtttcaatgtatcttttttcacgcgcacttgatactttaaaaaatttgtgtgctatttataaatgtgctgctttacttttcaaacatgtgggaatgtatctttccattattgatttctagtttatttattctgtaatctaagaacatactttgtgtgttttctattcttttaaaattgttaagatatattttatggcccacaatgttacctatcttgatgaatgttctgagtaagcttgagaaaaaatgttttctgcttttgttggatggaatgctttaaaaatgtgaattatagcaaattgatgatgtgtactcttcacaccatctgtattagtctgttctcatgccactaataaggacatacctgagaccgggtaatttataaaggaaagaagttcaatagactcactgttccccagggctggggaggccctaggaaacatacaaccatggcagaaggggaagcaaacatgtccttcttcacatggtggcagtaaggagaagtgcagagtaaaggcagggaaaagacccttataaaaccgtcagatgtgatgagaactcactcactatcatgtgaatatcatgcaggtagccacccccaggattcaattaccttccactgggtccctcctacaacacatgaggattatgggaactacaggtcaagatgagatttgggtggggacacagccaaacaatatcaccatctgtatctttactgacttcctgctatctcaagctatcaattattgacagaagggtactgaagtctccaattacaatattgaatttgccgatttctcctttcactttaatcaatttttgccttatatgtttttacactcttacgttaagtatatacagtttaaaattgttatacttttttaaagaattgatcctttaacctttatttaatgcttttttttctcttgataactttccttgtcctgaagtttctttacttgaaattaatataggaacctcagctttttttttttgattaatgttttcatggaattttttttaattcttttaccgcaacctgaatcttggtagtcagagtgtgtttttcttttatagtcaccatgtagttgggtcctgagtgtataaagtttttttttttttttaacccatgctggcaagcttagttttataattgctttatttatatcatttacatttaaggtgattattaatatagttagattgatatctgttatgtttgtgactattttccactcatagcgttaggtctttatttctattttcctatgttttcttccttttctggtattaaatgtataatttatatgattgaattttatctgccctcttgaaaggtatatcaattatacttatttctatttttatttttagtgtttcccctggagtttacaatatatgttcttaactaatataagttcaccttcaaataatagcatagcaattcacatttactacatgtacctactaatagaatatcccaaatttctttcacctctctttataacgtttcacttatctatattctcttttaactaataccttgtgactatttttgccttaactgaacagttatgttaaagcaattaaggatagaaaaattaaacaatttaccttctttcatttcttctccgttcatttcttctgttgctcctcgtttgtttacatagatccaaggtttttaaccatcttcctatgactgaaaatctttttcttaacatttcttgcagggaaggctactgatacttcatttctttgtttattgttgctgttgttgttgtttgtctgagaaagcatttattccctttccacatttattccctagccatccagaacagcctaggatttgttactgattcccctagacacaagagttccttccatgctttattcccatgattaatgtgaccctggggtataaaactcagagtgggctgctttggggggatccctcagctgtagtacaagtggggtgcatacagtgaagactctatcttctccaggcagcttttctgagacttgggggatgaacttacaatgaaccctaggcttccattgtcccttgctccctatctgtaagtaacaggtctgtttcatgtaacctattgcatatataatattctgtctcaccaggaaaggatgcagaagttacctttcacttgcacaaccaagcaaacaaatgactatgggagaaatgcaaaatccacatggaaaacatcaaaacatcaccctcttcttatataatgaagatttttaggaactcaatgttgtacctaattcagaataaatgtcatcagtcgtgacaaaaaaaaaaaggctctctgaaaaaagtctaatttgtagcatttgctgatctctgtagtataaatactcccatcacgttctctttcaacttagcaatgtgacgcctctaaacacagagctggaaagagatgctcaaaattgccttttgtgagctggtatgaagtggccccagcaaaccaatgaaaaaa

What is claimed is:

1-15. (canceled)

16. A method for determining a replicative senescence status of a cell, the method comprising:
determining a methylation status of at least one CpG-dinucleotide within a region of at least one of about 50,000 bp upstream and downstream of at least one CpG-dinucleotide selected from the group consisting of GRM7-CpG-site #1, CASR-CpG-site #1, PRAMEF2-CpG-site #1, SELP-CpG-site #1, CASP14-CpG-site #1, and KRTAP13-3-CpG-site #1; and
comparing the methylation status of each of the at least one CpG-dinucleotide determined with a reference methylation status of the respective CpG-dinucleotide.

17. The method as recited in claim 16, wherein the methylation status of the at least one CpG-dinucleotide linearly correlates with a replicative senescence status of the cell.

18. The method as recited in claim 16, wherein the methylation status is determined of the at least one CpG-dinucleotide within a region of at least one of about 40,000 bp upstream and downstream of at least one CpG-dinucleotide selected from the group consisting of GRM7-CpG-site #1, CASR-CpG-site #1, PRAMEF2-CpG-site #1, SELP-CpG-site #1, CASP14-CpG-site #1, and KRTAP13-3-CpG-site #1.

19. The method as recited in claim 16, wherein the methylation status is determined for at least one CpG-dinucleotide selected from the group consisting of GRM7-CpG-site #1, CASR-CpG-site #1, PRAMEF2-CpG-site #1, SELP-CpG-site #1, CASP14-CpG-site #1, and KRTAP13-3-CpG-site #1 for multiple corresponding DNA molecules.

20. The method as recited in claim 16, wherein the cell is selected from stromal cells and induced pluripotent stem cells.

21. The method as recited in claim 16, wherein the methylation status is determined of two, three, four, five or six CpG-dinucleotides from different DNA molecules, which are selected from the group consisting of DNA molecules comprising at least one CpG-dinucleotide selected from the group consisting of GRM7-CpG-site #1, CASR-CpG-site #1, PRAMEF2-CpG-site #1, SELP-CpG-site #1, CASP14-CpG-site #1, and KRTAP13-3-CpG-site #1.

22. The method as recited in claim 16, wherein the methylation status is determined by at least one method selected from a methylation-specific PCR, a COBRA-Assay, a methylation-specific restriction pattern analysis, a CHIP-sequencing, a methyl-CAP-sequencing, and a sequence analysis of bisulfite-treated DNA.

23. A method of using at least one nucleic acid molecule to determine a replicative senescence status of a cell as recited in the method as recited in claim 16, wherein the nucleic acid molecule comprises at least one nucleotide sequence selected from the group consisting of:
a first nucleotide sequence comprising at least one CpG-dinucleotide within a region of at least one of about 50,000 bp upstream and downstream of at least one CpG-dinucleotide selected from the group consisting of GRM7-CpG-site #1, CASR-CpG-site #1, PRAMEF2-CpG-site #1, SELP-CpG-site #1, CASP14-CpG-site #1, and KRTAP13-3-CpG-site #1,
a second nucleotide sequence which differs from the first nucleotide sequence in that at most 10% of the nucleotides of the at least one CpG-dinucleotide are replaced, and
a third nucleotide sequence which corresponds to a complementary strand of the first nucleotide sequence or of the second nucleotide sequence.

24. A method of using at least one nucleic acid molecule to identify a cell culture suitable for a therapeutic use, wherein the nucleic acid molecule comprises at least one nucleotide sequence selected from the group consisting of:
a first nucleotide sequence comprising at least one CpG-dinucleotide within a region of at least one of about 50,000 bp upstream and downstream of at least one CpG-dinucleotide selected from the group consisting of GRM7-CpG-site #1, CASR-CpG-site #1, PRAMEF2-CpG-site #1, SELP-CpG-site #1, CASP14-CpG-site #1, and KRTAP13-3-CpG-site #1,
a second nucleotide sequence which differs from the first nucleotide sequence in that at most 10% of the nucleotides of the at least one CpG-dinucleotide are replaced, and
a third nucleotide sequence which corresponds to a complementary strand of the first nucleotide sequence or of the second nucleotide sequence.

25. A kit for determining a replicative senescence status of a cell or for identifying a cell culture suitable for a therapeutic use, the kit comprising:
at least one oligonucleotide primer to at least one of amplify and analyze at least one CpG-dinucleotide selected from the group consisting of GRM7-CpG-site #1, CASR-CpG-site #1, PRAMEF2-CpG-site #1, SELP-CpG-site #1, CASP14-CpG-site #1, and KRTAP13-3-CpG-site #1.

26. The kit as recited in claim 25, wherein the at least one CpG-dinucleotide is within a region of at least one of about 50,000 bp upstream and downstream of the at least one CpG-dinucleotide selected from the group consisting of GRM7-CpG-site #1, CASR-CpG-site #1, PRAMEF2-CpG-site #1, SELP-CpG-site #1, CASP14-CpG-site #1, and KRTAP13-3-CpG-site #1.

27. The kit as recited in claim 26, further comprising at least one of a reaction buffer and a reagent for at least one method selected from a PCR-amplification, a bisulfite-conversion of DNA, a DNA-sequencing, a DNA-pyrosequencing, and a COBRA-assay.

28. A computer-readable medium comprising stored computer-executable instructions prompting a computer to perform a method for determining a replicative senescence status of a cell as recited in claim 16, the stored computer-executable instructions including the steps of:
inputting at least one value of a determined methylation status of at least one CpG-dinucleotide within a region of at least one of about 50,000 bp upstream and downstream of at least one CpG-dinucleotide selected from the group consisting of GRM7-CpG-site #1, CASR-CpG-site #1, PRAMEF2-CpG-site #1, SELP-CpG-site #1, CASP14-CpG-site #1, and KRTAP13-3-CpG-site #1;
comparing the at least one value of the determined methylation status with a stored data representing a correlation between a methylation status of the CpG-dinucleotide and a replicative senescence status of the cell; and
displaying the replicative senescence status of the cell.

29. The computer-readable medium as recited in claim 28, wherein the stored data comprises at least one linear regression equation.
